(19) United States
(12) Patent Application Publication
(10) Pub. No.: US 2023/0212599 A1
(43) Pub. Date: Jul. 6, 2023

(54) COMPOSITIONS AND METHODS FOR IMPROVED AGRONOMIC PERFORMANCE IN PLANTS

(71) Applicant: PIONEER HI-BRED INTERNATIONAL, INC., JOHNSTON, IA (US)

(72) Inventor: CARL SIMMONS, DES MOINES, IA (US)

(73) Assignee: PIONEER HI-BRED INTERNATIONAL, INC., JOHNSTON, IA (US)

(21) Appl. No.: 17/647,183

(22) Filed: Jan. 6, 2022

(51) Int. Cl. C12N 15/82

(52) U.S. Cl. CPC C12N 15/8261; C12N 15/8207; C12N 15/8205

(57) ABSTRACT

Provided are compositions comprising polynucleotides and polypeptides for the improvement of agronomic traits in plants, in particular maize plants. Also provided are recombinant DNA constructs, plants, plant cells, seed, grain comprising the polynucleotides and/or polypeptides. Additionally, various methods of employing the polynucleotides and genetic modifications in plants, such as methods for increasing yield of a plant are also provided herein.

### REFERENCE TO SEQUENCE LISTING SUBMITTED ELECTRONICALLY

[0001] The official copy of the sequence listing is submitted electronically via EFS-Web as an ASCII formatted sequence listing with a file named 8537-US-PSP_SequenceListing_ST25.txt created on 13 Nov. 2020 and having a size of 1357 kilobytes and is filed concurrently with the specification. The sequence listing comprised in this ASCII formatted document is part of the specification and is herein incorporated by reference in its entirety.

### FIELD

[0002] This disclosure relates to compositions and methods for improving agronomic traits, such as yield, in plants.

### BACKGROUND

[0003] Crop improvement has long created foundational wealth and supported societal development, human health and well-being, as well as adaptability to environmental change. Maize agronomic trait improvements have occurred for thousands of years, first supporting cultures in the Americas, and now world-wide. Crop improvement integrates diverse technologies including genetic solutions that range from traditional breeding to more recent biotechnology. Global demand and consumption of agricultural crops is increasing at a rapid pace. Accordingly, there is a need to develop new compositions and methods to increase yield in plants.

[0004] Despite advances in biotechnology, some key challenges in this type of research for product development which are commonly underappreciated. These challenges may help one better understand why despite hundreds of published reports of biotech genes improving model or crop plant productivity, and likely thousands more unpublished results, nonetheless apart from the gene performances and scientific achievements involved, very few have been yet commercialized. Importantly, despite these challenges, the efforts and results disclosed herein affirm that biotechnology can identity diverse individual genes that improve plant complex traits and yield, for example in elite germplasm, under commercially relevant field conditions.

### SUMMARY

[0005] Methods and compositions are provided for the improvement of crop plant characteristics, including those related to yield, agronomic potential, and agronomic performance.

### BRIEF DESCRIPTION OF THE SEQUENCE LISTING

[0006] The sequence descriptions and sequence listing attached hereto comply with the rules governing nucleotide and amino acid sequence disclosures in patent applications as set forth in 37 C.F.R. §§ 1.821 and 1.825. The sequence descriptions comprise the three letter codes for amino acids as defined in 37 C.F.R. §§ 1.821 and 1.825, which are incorporated herein by reference.
[0007] SEQID NO:1 is the Secale cereale DNA sequence of RYE CBF 31.
[0008] SEQID NO:2 is the Hevea braziliensis DNA sequence of HB-PT.
[0009] SEQID NO:3 is the Hevea braziliensis DNA sequence of HB-PT.
[0010] SEQID NO:4 is the Zea mays DNA sequence of ZM-GA20OX1.
[0011] SEQID NO:5 is the Zea mays DNA sequence of ZM-MYB3.
[0012] SEQID NO:6 is the Zea mays DNA sequence of ZM-MYB3R-1.
[0013] SEQID NO:7 is the Zea mays DNA sequence of ZM-MS44.
[0014] SEQID NO:8 is the Zea mays DNA sequence of MS45.
[0015] SEQID NO:9 is the Zea mays DNA sequence of ZM-NAGS1.
[0016] SEQID NO:10 is the Arabidopsis thaliana DNA sequence of AT-FAD2.
[0017] SEQID NO:11 is the Arabidopsis thaliana DNA sequence of AT-PP2C.
[0018] SEQID NO:12 is the Arabidopsis thaliana DNA sequence of AT-DTP33.
[0019] SEQID NO:13 is the Arabidopsis thaliana DNA sequence of AT-BTIP.
[0020] SEQID NO:14 is the Arabidopsis thaliana DNA sequence of AT-NUCPU62.
[0021] SEQID NO:15 is the Arabidopsis thaliana DNA sequence of AT-IBO.
[0022] SEQID NO:16 is the Arabidopsis thaliana DNA sequence of AT-SIPR.
[0023] SEQID NO:17 is the Arabidopsis thaliana DNA sequence of AT-GSTU13.
[0024] SEQID NO:18 is the Arabidopsis thaliana DNA sequence of AT-CCO.
[0025] SEQID NO:19 is the Arabidopsis thaliana DNA sequence of AT-ESP.
[0026] SEQID NO:20 is the Arabidopsis thaliana DNA sequence of AT-SNF2.
[0027] SEQID NO:21 is the Arabidopsis thaliana DNA sequence of AT-TMK1.
[0028] SEQID NO:22 is the Arabidopsis thaliana DNA sequence of AT-NUCPU3.
[0029] SEQID NO:23 is the Arabidopsis thaliana DNA sequence of AT-DTP6.
[0030] SEQID NO:24 is the Arabidopsis thaliana DNA sequence of AT-RPK1.
[0031] SEQID NO:25 is the Arabidopsis thaliana DNA sequence of AT-NUCPU6.
[0032] SEQID NO:26 is the Arabidopsis thaliana DNA sequence of AT-40S RP-SA.
[0033] SEQID NO:27 is the Arabidopsis thaliana DNA sequence of AT-ZFP6.
[0034] SEQID NO:28 is the Arabidopsis thaliana DNA sequence of AT-C3HC4.
[0035] SEQID NO:29 is the Arabidopsis thaliana DNA sequence of AT-NUCPU7.
[0036] SEQID NO:30 is the Arabidopsis thaliana DNA sequence of AT-NDH1.
[0037] SEQID NO:31 is the Arabidopsis thaliana DNA sequence of AT-FBOX7.
[0038] SEQID NO:32 is the Arabidopsis thaliana DNA sequence of AT-NUCPU29.
[0039] SEQID NO:33 is the Arabidopsis thaliana DNA sequence of AT-NUCPU63.
[0040] SEQID NO:34 is the Arabidopsis thaliana DNA sequence of AT-ARL3.
[0041] SEQID NO:35 is the Arabidopsis thaliana DNA sequence of AT-HAD1.
[0042] SEQID NO:36 is the Arabidopsis thaliana DNA sequence of AT-TRAF.
[0043] SEQID NO:37 is the Arabidopsis thaliana DNA sequence of AT-HYDROLASE2.
[0044] SEQID NO:38 is the Arabidopsis thaliana DNA sequence of AT-DTP25.
[0045] SEQID NO:39 is the Arabidopsis thaliana DNA sequence of AT-EXST.
[0046] SEQID NO:40 is the Arabidopsis thaliana DNA sequence of AT-NUCPU45.
[0047] SEQID NO:41 is the Arabidopsis thaliana DNA sequence of AT-RBP2.
[0048] SEQID NO:42 is the Arabidopsis thaliana DNA sequence of AT-ABCG21.
[0049] SEQID NO:43 is the Arabidopsis thaliana DNA sequence of AT-TYRPPASE.
[0050] SEQID NO:44 is the Arabidopsis thaliana DNA sequence of AT-NUCPU27.
[0051] SEQID NO:45 is the Arabidopsis thaliana DNA sequence of AT-DTP5.
[0052] SEQID NO:46 is the Arabidopsis thaliana DNA sequence of AT-ETA3.
[0053] SEQID NO:47 is the Arabidopsis thaliana DNA sequence of AT-DTP7.
[0054] SEQID NO:48 is the Arabidopsis thaliana DNA sequence of AT-NUCPU80.
[0055] SEQID NO:49 is the Arabidopsis thaliana DNA sequence of AT-NUCPU81.
[0056] SEQID NO:50 is the Arabidopsis thaliana DNA sequence of AT-NUCPU34.
[0057] SEQID NO:51 is the Arabidopsis thaliana DNA sequence of AT-BHLH1.
[0058] SEQID NO:52 is the Arabidopsis thaliana DNA sequence of AT-MLP.
[0059] SEQID NO:53 is the Arabidopsis thaliana DNA sequence of AT-NDK4.
[0060] SEQID NO:54 is the Arabidopsis thaliana DNA sequence of AT-ABI1.
[0061] SEQID NO:55 is the Arabidopsis thaliana DNA sequence of AT-DTP32.
[0062] SEQID NO:56 is the Arabidopsis thaliana DNA sequence of AT-RD26-2.
[0063] SEQID NO:57 is the Arabidopsis thaliana DNA sequence of AT-RHP6.
[0064] SEQID NO:58 is the Arabidopsis thaliana DNA sequence of AT-DTP1.
[0065] SEQID NO:59 is the Arabidopsis thaliana DNA sequence of AT-PPLDD.
[0066] SEQID NO:60 is the Arabidopsis thaliana DNA sequence of AT-NUCPU74.
[0067] SEQID NO:61 is the Arabidopsis thaliana DNA sequence of AT-MYB.
[0068] SEQID NO:62 is the Arabidopsis thaliana DNA sequence of AT-PAPR.
[0069] SEQID NO:63 is the Arabidopsis thaliana DNA sequence of AT-AT5G10000/FERREDOXIN.
[0070] SEQID NO:64 is the Arabidopsis thaliana DNA sequence of AT-PEPA.
[0071] SEQID NO:65 is the Arabidopsis thaliana DNA sequence of AT-NUCPU59.
[0072] SEQID NO:66 is the Arabidopsis thaliana DNA sequence of AT-RECPU3.
[0073] SEQID NO:67 is the Arabidopsis thaliana DNA sequence of AT-PP2B12.
[0074] SEQID NO:68 is the Arabidopsis thaliana DNA sequence of AT-DTP2.
[0075] SEQID NO:69 is the Arabidopsis thaliana DNA sequence of AT-SK11.
[0076] SEQID NO:70 is the Arabidopsis thaliana DNA sequence of AT-FBOX8.
[0077] SEQID NO:71 is the Arabidopsis thaliana DNA sequence of AT-UPM1.
[0078] SEQID NO:72 is the Arabidopsis thaliana DNA sequence of AT-C3HC4 ZF2.
[0079] SEQID NO:73 is the Arabidopsis thaliana DNA sequence of AT-C3HC4 ZF2.
[0080] SEQID NO:74 is the Arabidopsis thaliana DNA sequence of AT-PBP.
[0081] SEQID NO:75 is the Arabidopsis thaliana DNA sequence of AT-C2DP1.
[0082] SEQID NO:76 is the Arabidopsis thaliana DNA sequence of AT-NUCPU1.
[0083] SEQID NO:77 is the Arabidopsis thaliana DNA sequence of AT-NUCPU1B.
[0084] SEQID NO:78 is the Arabidopsis thaliana DNA sequence of AT-LPK.
[0085] SEQID NO:79 is the Arabidopsis thaliana DNA sequence of AT-CXE20.
[0086] SEQID NO:80 is the Arabidopsis thaliana DNA sequence of AT-DTP4 (=AT-CXE20).
[0087] SEQID NO:81 is the Zea mays DNA sequence of ZM-TSCP534058.
[0088] SEQID NO:82 is the Zea mays DNA sequence of ZM-CTATP.
[0089] SEQID NO:83 is the Zea mays DNA sequence of ZM-HARDY.
[0090] SEQID NO:84 is the Zea mays DNA sequence of ZM-SIG2B.
[0091] SEQID NO:85 is the Zea mays DNA sequence of ZM-SRTF18.
[0092] SEQID NO:86 is the Zea mays DNA sequence of ZM-EIL6.
[0093] SEQID NO:87 is the Zea mays DNA sequence of ZM-UCP1.
[0094] SEQID NO:88 is the Zea mays DNA sequence of ZM-ALF1.
[0095] SEQID NO:89 is the Zea mays DNA sequence of ZM-NUCPU16.
[0096] SEQID NO:90 is the Zea mays DNA sequence of ZM-EER5.
[0097] SEQID NO:91 is the Zea mays DNA sequence of ZM-TMM.
[0098] SEQID NO:92 is the Zea mays DNA sequence of ZM-LRR-RK-P.
[0099] SEQID NO:93 is the Zea mays DNA sequence of VAC PPASE.
[0100] SEQID NO:94 is the Zea mays DNA sequence of ZM-ARP7.
[0101] SEQID NO:95 is the Zea mays DNA sequence of ZM-HP1.
[0102] SEQID NO:96 is the Zea mays DNA sequence of ZM-XERICO1.
[0103] SEQID NO:97 is the Zea mays DNA sequence of BETAEXPANSIN.
[0104] SEQID NO:98 is the Zea mays DNA sequence of ZM-MMS21.
[0105] SEQID NO:99 is the Zea mays DNA sequence of ZM-GA2 OXIDASE-LIKE.
[0106] SEQID NO:100 is the Zea mays DNA sequence of ZM-GA2 OXIDASE-LIKE PRO.
[0107] SEQID NO:101 is the Zea mays DNA sequence of ZM-XTH3.
[0108] SEQID NO:102 is the Zea mays DNA sequence of ZM-LOX6.
[0109] SEQID NO:103 is the Zea mays DNA sequence of ZM-NAP2.
[0110] SEQID NO:104 is the Zea mays DNA sequence of ZM-DOF11.
[0111] SEQID NO:105 is the Zea mays DNA sequence of ZM-TF-Q5SMY2.
[0112] SEQID NO:106 is the Zea mays DNA sequence of ZM-GS1-5.
[0113] SEQID NO:107 is the Zea mays DNA sequence of ZM-EX1.
[0114] SEQID NO:108 is the Zea mays DNA sequence of ZM-TOR.
[0115] SEQID NO:109 is the Zea mays DNA sequence of ZM-GS1-1.
[0116] SEQID NO:110 is the Zea mays DNA sequence of ZM-MACS6B.
[0117] SEQID NO:111 is the Zea mays DNA sequence of ZM-GCN2.
[0118] SEQID NO:112 is the Zea mays DNA sequence of ZM-ACO2.
[0119] SEQID NO:113 is the Zea mays DNA sequence of ZM-ASCORBATE PEROXIDASE.
[0120] SEQID NO:114 is the Zea mays DNA sequence of ZM-ACS6.
[0121] SEQID NO:115 is the Zea mays DNA sequence of ZM-MACS6A.
[0122] SEQID NO:116 is the Zea mays DNA sequence of ZM-PT5.
[0123] SEQID NO:117 is the Zea mays DNA sequence of ZM-T1N6.6.
[0124] SEQID NO:118 is the Zea mays DNA sequence of ZM-M47-V1.
[0125] SEQID NO:119 is the Zea mays DNA sequence of ZM-SVP3.
[0126] SEQID NO:120 is the Zea mays DNA sequence of ZM-PPDX.
[0127] SEQID NO:121 is the Zea mays DNA sequence of ZM-NRP1.
[0128] SEQID NO:122 is the Zea mays DNA sequence of ZM-RET2.
[0129] SEQID NO:123 is the Zea mays DNA sequence of ZM-ARGOS4.
[0130] SEQID NO:124 is the Zea mays DNA sequence of ZM-AOS1.
[0131] SEQID NO:125 is the Zea mays DNA sequence of ZM-GRF9.
[0132] SEQID NO:126 is the Zea mays DNA sequence of ZM-EIN2.
[0133] SEQID NO:127 is the Zea mays DNA sequence of ZM-AVP3.
[0134] SEQID NO:128 is the Zea mays DNA sequence of ZM-MADS56-V1.
[0135] SEQID NO:129 is the Zea mays DNA sequence of ZM-M-SV2A.
[0136] SEQID NO:130 is the Zea mays DNA sequence of ZM-LEA5.
[0137] SEQID NO:131 is the Zea mays DNA sequence of ZM-LBD1.
[0138] SEQID NO:132 is the Zea mays DNA sequence of ZM-C3HC4 RF1.
[0139] SEQID NO:133 is the Zea mays DNA sequence of ZM-RTA3.
[0140] SEQID NO:134 is the Zea mays DNA sequence of ZM-CYCLIN B2.2.
[0141] SEQID NO:135 is the Zea mays DNA sequence of ZM-RNAHEL.
[0142] SEQID NO:136 is the Zea mays DNA sequence of ZM-NPQ4.
[0143] SEQID NO:137 is the Zea mays DNA sequence of ZM-DP0780.
[0144] SEQID NO:138 is the Zea mays DNA sequence of ZM-ARABIDILLO-2.
[0145] SEQID NO:139 is the Zea mays DNA sequence of ZM-MADS32.
[0146] SEQID NO:140 is the Zea mays DNA sequence of ZM-ABA ACTIVATED KINASE1.
[0147] SEQID NO:141 is the Zea mays DNA sequence of ZM-MYB1.
[0148] SEQID NO:142 is the Zea mays DNA sequence of ZM-MYB2.
[0149] SEQID NO:143 is the Zea mays DNA sequence of ZM-MYB3R-2.
[0150] SEQID NO:144 is the Zea mays DNA sequence of ZM-PEPC.
[0151] SEQID NO:145 is the Zea mays DNA sequence of ZM-IPT2.
[0152] SEQID NO:146 is the Zea mays DNA sequence of ZM-CPCT(ALT).
[0153] SEQID NO:147 is the Zea mays DNA sequence of ZM-SDH3.
[0154] SEQID NO:148 is the Zea mays DNA sequence of SUCT.
[0155] SEQID NO:149 is the Zea mays DNA sequence of ZM-ARP6.
[0156] SEQID NO:150 is the Zea mays DNA sequence of ZM-PC4.
[0157] SEQID NO:151 is the Zea mays DNA sequence of ZM-CATALASE2.
[0158] SEQID NO:152 is the Zea mays DNA sequence of ZM-UBA-DELTA.
[0159] SEQID NO:153 is the Zea mays DNA sequence of ZM-AFB7.
[0160] SEQID NO:154 is the Zea mays DNA sequence of ZM-MCUPFB miRNA.
[0161] SEQID NO:155 is the Zea mays DNA sequence of ZM-DP0950.
[0162] SEQID NO:156 is the Zea mays DNA sequence of ZM-IPT1.
[0163] SEQID NO:157 is the Zea mays DNA sequence of ZM-IPT.
[0164] SEQID NO:158 is the Zea mays DNA sequence of ZM-PPC.
[0165] SEQID NO:159 is the Zea mays DNA sequence of ZM-PUB22.
[0166] SEQID NO:160 is the Zea mays DNA sequence of ZM-RBCS.
[0167] SEQID NO:161 is the Zea mays DNA sequence of ZM-SSU TP.
[0168] SEQID NO:162 is the Zea mays DNA sequence of ZM-PARP1.
[0169] SEQID NO:163 is the Zea mays DNA sequence of ZM-MBF1B.
[0170] SEQID NO:164 is the Zea mays DNA sequence of ZM-ZIM FP-LIKE.
[0171] SEQID NO:165 is the Zea mays DNA sequence of ZM-VRS1.
[0172] SEQID NO:166 is the Zea mays DNA sequence of ZM-ETA3.
[0173] SEQID NO:167 is the Zea mays DNA sequence of ZM-NRT1.1L2.
[0174] SEQID NO:168 is the Zea mays DNA sequence of ZM-CGS.
[0175] SEQID NO:169 is the Zea mays DNA sequence of ZM-GL1-V1.
[0176] SEQID NO:170 is the Zea mays DNA sequence of ZM-NAC7.
[0177] SEQID NO:171 is the Zea mays DNA sequence of ZM-ATG18.
[0178] SEQID NO:172 is the Zea mays DNA sequence of ZM-NAC5.
[0179] SEQID NO:173 is the Zea mays DNA sequence of ZM-ARDA.
[0180] SEQID NO:174 is the Zea mays DNA sequence of ZM-LEC1-LIKE.
[0181] SEQID NO:175 is the Zea mays DNA sequence of ZM-RR10.
[0182] SEQID NO:176 is the Zea mays DNA sequence of ZM-RR10 382-686.
[0183] SEQID NO:177 is the Zea mays DNA sequence of ZM-NAC010.
[0184] SEQID NO:178 is the Zea mays DNA sequence of ZM-ALDH7.
[0185] SEQID NO:179 is the Zea mays DNA sequence of ZM-MADS2.
[0186] SEQID NO:180 is the Zea mays DNA sequence of ZM-EBNA2.
[0187] SEQID NO:181 is the Zea mays DNA sequence of ZM-ARGOS3.
[0188] SEQID NO:182 is the Zea mays DNA sequence of ZM-EBF2.
[0189] SEQID NO:183 is the Zea mays DNA sequence of ZM-FBL2.
[0190] SEQID NO:184 is the Zea mays DNA sequence of ZM-PWWPDPL1.
[0191] SEQID NO:185 is the Zea mays DNA sequence of ZM-EDCP647011.
[0192] SEQID NO:186 is the Zea mays DNA sequence of ZM-GLYH.
[0193] SEQID NO:187 is the Zea mays DNA sequence of ZM-ODP2.
[0194] SEQID NO:188 is the Zea mays DNA sequence of ZM-MPG-V1.
[0195] SEQID NO:189 is the Zea mays DNA sequence of BRITTLE1.
[0196] SEQID NO:190 is the Zea mays DNA sequence of ZM-CHYR1-B.
[0197] SEQID NO:191 is the Zea mays DNA sequence of ZM-UPPS.
[0198] SEQID NO:192 is the Zea mays DNA sequence of ZM-ZMM28.
[0199] SEQID NO:193 is the Zea mays DNA sequence of ZM-SUS1.
[0200] SEQID NO:194 is the Zea mays DNA sequence of ZM-ALF2.
[0201] SEQID NO:195 is the Zea mays DNA sequence of ZM-HVA22E.
[0202] SEQID NO:196 is the Zea mays DNA sequence of ZM-SUMO E3.
[0203] SEQID NO:197 is the Zea mays DNA sequence of ZM-ERA1.
[0204] SEQID NO:198 is the Zea mays DNA sequence of ZM-FARNESYL TRANSF B.
[0205] SEQID NO:199 is the Zea mays DNA sequence of ZM-FARNESYL TRANSFERASE B.
[0206] SEQID NO:200 is the Zea mays DNA sequence of ZM-NAC87-2.
[0207] SEQID NO:201 is the Zea mays DNA sequence of ZM-COL.
[0208] SEQID NO:202 is the Zea mays DNA sequence of ZM-STPP3.
[0209] SEQID NO:203 is the Zea mays DNA sequence of ZM-STPP3-2 (PRO).
[0210] SEQID NO:204 is the Zea mays DNA sequence of ZM-ARGOS6.
[0211] SEQID NO:205 is the Zea mays DNA sequence of ZM-HMG.
[0212] SEQID NO:206 is the Zea mays DNA sequence of ZM-TREHALASE.
[0213] SEQID NO:207 is the Zea mays DNA sequence of ZM-WRKY67.
[0214] SEQID NO:208 is the Zea mays DNA sequence of ZM-NAR2.2.
[0215] SEQID NO:209 is the Zea mays DNA sequence of ZM-RT1.
[0216] SEQID NO:210 is the Zea mays DNA sequence of ZM-NAC1.
[0217] SEQID NO:211 is the Zea mays DNA sequence of ZM-CCCH.
[0218] SEQID NO:212 is the Zea mays DNA sequence of ZM-OBP3AL.
[0219] SEQID NO:213 is the Zea mays DNA sequence of ZM-ARGOS5.
[0220] SEQID NO:214 is the Zea mays DNA sequence of ZM-ARFGAP 1.
[0221] SEQID NO:215 is the Zea mays DNA sequence of ZM-DDA1.
[0222] SEQID NO:216 is the Zea mays DNA sequence of ZM-MYB.
[0223] SEQID NO:217 is the Zea mays DNA sequence of ZM-ADA2.
[0224] SEQID NO:218 is the Zea mays DNA sequence of ZM-GW3-1 (=ZM-BG1H1).
[0225] SEQID NO:219 is the Zea mays DNA sequence of ZM-ABA8OX1.
[0226] SEQID NO:220 is the Zea mays DNA sequence of ZM-PP2C.
[0227] SEQID NO:221 is the Zea mays DNA sequence of ZM-WILTY.
[0228] SEQID NO:222 is the Zea mays DNA sequence of ZM-EIL2.
[0229] SEQID NO:223 is the Zea mays DNA sequence of ZM-ARGOS8.
[0230] SEQID NO:224 is the Zea mays DNA sequence of ZM-WSPL1.
[0231] SEQID NO:225 is the Zea mays DNA sequence of ZM-DOF20.
[0232] SEQID NO:226 is the Zea mays DNA sequence of ZM-CBF1.
[0233] SEQID NO:227 is the Zea mays DNA sequence of ZM-RR2.
[0234] SEQID NO:228 is the Zea mays DNA sequence of ZM-XERICO2.
[0235] SEQID NO:229 is the Zea mays DNA sequence of ZM-TFL26.
[0236] SEQID NO:230 is the Zea mays DNA sequence of ZM-NUCPU3.
[0237] SEQID NO:231 is the Zea mays DNA sequence of ZM-ZF-Q75KW5.
[0238] SEQID NO:232 is the Zea mays DNA sequence of ZM-EFTU.
[0239] SEQID NO:233 is the Agrobacterium tumefaciens DNA sequence of BIP.
[0240] SEQID NO:234 is the Zea mays DNA sequence of ZM-PP2AC.
[0241] SEQID NO:235 is the Zea mays DNA sequence of ZM-BR1.
[0242] SEQID NO:236 is the Zea mays DNA sequence of ZM-EPF2A-MP.
[0243] SEQID NO:237 is the Zea mays DNA sequence of ZM-ARGOS.
[0244] SEQID NO:238 is the Zea mays DNA sequence of ZM-ARGOS1.
[0245] SEQID NO:239 is the Zea mays DNA sequence of ZM-ARGOS2.
[0246] SEQID NO:240 is the Zea mays DNA sequence of ZM-DET2.
[0247] SEQID NO:241 is the Zea mays DNA sequence of ZM-HP-Q94I52.
[0248] SEQID NO:242 is the Zea mays DNA sequence of ZM-EG8-LIKE.
[0249] SEQID NO:243 is the Zea mays DNA sequence of ZM-CKX2.
[0250] SEQID NO:244 is the Zea mays DNA sequence of ZM-YECPU2.
[0251] SEQID NO:245 is the Zea mays DNA sequence of ZM-ANR1.
[0252] SEQID NO:246 is the Zea mays DNA sequence of ZM-DRO1.
[0253] SEQID NO:247 is the Zea mays DNA sequence of ZM-DRO1.
[0254] SEQID NO:248 is the Zea mays DNA sequence of ZM-RAP2.7.
[0255] SEQID NO:249 is the Zea mays DNA sequence of ZM-GPCR.
[0256] SEQID NO:250 is the Zea mays DNA sequence of ZM-ERECTA.
[0257] SEQID NO:251 is the Zea mays DNA sequence of ZM-MYB1R1.
[0258] SEQID NO:252 is the Zea mays DNA sequence of ZM-GRF5.
[0259] SEQID NO:253 is the Zea mays DNA sequence of ZM-NAC21-5.
[0260] SEQID NO:254 is the Zea mays DNA sequence of ZM-GS1-3.
[0261] SEQID NO:255 is the Zea mays DNA sequence of ZM-SPS.
[0262] SEQID NO:256 is the Zea mays DNA sequence of ZM-MEZ2.
[0263] SEQID NO:257 is the Zea mays DNA sequence of ZM-PROG1 IR.
[0264] SEQID NO:258 is the Zea mays DNA sequence of ZM-ACC SYNTHASE 2.
[0265] SEQID NO:259 is the Zea mays DNA sequence of ZM-ACS7.
[0266] SEQID NO:260 is the Pichia angusta DNA sequence of YNT1 (PA) MO.
[0267] SEQID NO:261 is the Diplodia maydis DNA sequence of ACCD1 (DM).
[0268] SEQID NO:262 is the Artificial DNA sequence of ZM-TIC40 CTP1CB-SOR Fusion Zea mays Clostridium beijerinckii.
[0269] SEQID NO:263 is the Artificial DNA sequence of ZM-LHC 1-680 CTP1 CB-SOR (NO MET) Fusion Zea mays Clostridium beijerinckii.
[0270] SEQID NO:264 is the Zea mays DNA sequence of ZM-MSRB2.
[0271] SEQID NO:265 is the Zea mays DNA sequence of ZM-RR5.
[0272] SEQID NO:266 is the Zea mays DNA sequence of ZM-CB5A.
[0273] SEQID NO:267 is the Saccharomyces cerevisiae DNA sequence of SC-RER2.
[0274] SEQID NO:268 is the Zea mays DNA sequence of ZM-ASA1.
[0275] SEQID NO:269 is the Sorghum bicolor DNA sequence of SB-C4PEPC.
[0276] SEQID NO:270 is the Sorghum bicolor DNA sequence of SB-MADS28 GENOMIC.
[0277] SEQID NO:271 is the Clostridium beijerinckii DNA sequence of CB-SOR.
[0278] SEQID NO:272 is the Sorghum bicolor DNA sequence of SB-STPP3-4.
[0279] SEQID NO:273 is the Zea mays DNA sequence of ZM-LEA4-2.
[0280] SEQID NO:274 is the Zea mays DNA sequence of ZM-EPFL9.
[0281] SEQID NO:275 is the Ustilago maydis DNA sequence of UM-SUC2.
[0282] SEQID NO:276 is the Ustilago maydis DNA sequence of UM-03605.
[0283] SEQID NO:277 is the Zea mays DNA sequence of ZM-ABI5.
[0284] SEQID NO:278 is the Agrobacterium tumefaciens DNA sequence of IPT.
[0285] SEQID NO:279 is the Oryza sativa DNA sequence of OS-GST (DP0055).
[0286] SEQID NO:280 is the Oryza sativa DNA sequence of OS-NUECP8.
[0287] SEQID NO:281 is the Oryza sativa DNA sequence of OS-TIM17.
[0288] SEQID NO:282 is the Oryza sativa DNA sequence of OS-ARGOS(MOD1).
[0289] SEQID NO:283 is the Oryza sativa DNA sequence of OS-DP0691-V1.
[0290] SEQID NO:284 is the Oryza sativa DNA sequence of OS-MADS18.
[0291] SEQID NO:285 is the Oryza sativa DNA sequence of OS-NUECP2.
[0292] SEQID NO:286 is the Oryza sativa DNA sequence of OS-DP1013.
[0293] SEQID NO:287 is the Oryza sativa DNA sequence of OS-DP1002.
[0294] SEQID NO:288 is the Secale cereale PRT sequence of RYE CBF 31.
[0295] SEQID NO:289 is the Hevea braziliensis PRT sequence of HB-PT.
[0296] SEQID NO:290 is the Hevea braziliensis PRT sequence of HB-PT.
[0297] SEQID NO:291 is the Zea mays PRT sequence of ZM-GA20OX1.
[0298] SEQID NO:292 is the Zea mays PRT sequence of ZM-MYB3.
[0299] SEQID NO:293 is the Zea mays PRT sequence of ZM-MYB3R-1.
[0300] SEQID NO:294 is the Zea mays PRT sequence of ZM-NAGS1.
[0301] SEQID NO:295 is the Arabidopsis thaliana PRT sequence of AT-FAD2.
[0302] SEQID NO:296 is the Arabidopsis thaliana PRT sequence of AT-PP2C.
[0303] SEQID NO:297 is the Arabidopsis thaliana PRT sequence of AT-DTP33.
[0304] SEQID NO:298 is the Arabidopsis thaliana PRT sequence of AT-BTIP.
[0305] SEQID NO:299 is the Arabidopsis thaliana PRT sequence of AT-NUCPU62.
[0306] SEQID NO:300 is the Arabidopsis thaliana PRT sequence of AT-IBO.
[0307] SEQID NO:301 is the Arabidopsis thaliana PRT sequence of AT-SIPR.
[0308] SEQID NO:302 is the Arabidopsis thaliana PRT sequence of AT-GSTU13.
[0309] SEQID NO:303 is the Arabidopsis thaliana PRT sequence of AT-CCO.
[0310] SEQID NO:304 is the Arabidopsis thaliana PRT sequence of AT-ESP.
[0311] SEQID NO:305 is the Arabidopsis thaliana PRT sequence of AT-SNF2.
[0312] SEQID NO:306 is the Arabidopsis thaliana PRT sequence of AT-TMK1.
[0313] SEQID NO:307 is the Arabidopsis thaliana PRT sequence of AT-NUCPU3.
[0314] SEQID NO:308 is the Arabidopsis thaliana PRT sequence of AT-DTP6.
[0315] SEQID NO:309 is the Arabidopsis thaliana PRT sequence of AT-RPK1.
[0316] SEQID NO:310 is the Arabidopsis thaliana PRT sequence of AT-NUCPU6.
[0317] SEQID NO:311 is the Arabidopsis thaliana PRT sequence of AT-40S RP-SA.
[0318] SEQID NO:312 is the Arabidopsis thaliana PRT sequence of AT-ZFP6.
[0319] SEQID NO:313 is the Arabidopsis thaliana PRT sequence of AT-C3HC4.
[0320] SEQID NO:314 is the Arabidopsis thaliana PRT sequence of AT-NUCPU7.
[0321] SEQID NO:315 is the Arabidopsis thaliana PRT sequence of AT-NDH1.
[0322] SEQID NO:316 is the Arabidopsis thaliana PRT sequence of AT-FBOX7.
[0323] SEQID NO:317 is the Arabidopsis thaliana PRT sequence of AT-NUCPU29.
[0324] SEQID NO:318 is the Arabidopsis thaliana PRT sequence of AT-NUCPU63.
[0325] SEQID NO:319 is the Arabidopsis thaliana PRT sequence of AT-ARL3.
[0326] SEQID NO:320 is the Arabidopsis thaliana PRT sequence of AT-HAD1.
[0327] SEQID NO:321 is the Arabidopsis thaliana PRT sequence of AT-TRAF.
[0328] SEQID NO:322 is the Arabidopsis thaliana PRT sequence of AT-HYDROLASE2.
[0329] SEQID NO:323 is the Arabidopsis thaliana PRT sequence of AT-DTP25.
[0330] SEQID NO:324 is the Arabidopsis thaliana PRT sequence of AT-EXST.
[0331] SEQID NO:325 is the Arabidopsis thaliana PRT sequence of AT-NUCPU45.
[0332] SEQID NO:326 is the Arabidopsis thaliana PRT sequence of AT-RBP2.
[0333] SEQID NO:327 is the Arabidopsis thaliana PRT sequence of AT-ABCG21.
[0334] SEQID NO:328 is the Arabidopsis thaliana PRT sequence of AT-TYRPPASE.
[0335] SEQID NO:329 is the Arabidopsis thaliana PRT sequence of AT-NUCPU27.
[0336] SEQID NO:330 is the Arabidopsis thaliana PRT sequence of AT-DTP5.
[0337] SEQID NO:331 is the Arabidopsis thaliana PRT sequence of AT-ETA3.
[0338] SEQID NO:332 is the Arabidopsis thaliana PRT sequence of AT-DTP7.
[0339] SEQID NO:333 is the Arabidopsis thaliana PRT sequence of AT-NUCPU80.
[0340] SEQID NO:334 is the Arabidopsis thaliana PRT sequence of AT-NUCPU81.
[0341] SEQID NO:335 is the Arabidopsis thaliana PRT sequence of AT-NUCPU34.
[0342] SEQID NO:336 is the Arabidopsis thaliana PRT sequence of AT-BHLH1.
[0343] SEQID NO:337 is the Arabidopsis thaliana PRT sequence of AT-MLP.
[0344] SEQID NO:338 is the Arabidopsis thaliana PRT sequence of AT-NDK4.
[0345] SEQID NO:339 is the Arabidopsis thaliana PRT sequence of AT-ABI1.
[0346] SEQID NO:340 is the Arabidopsis thaliana PRT sequence of AT-DTP32.
[0347] SEQID NO:341 is the Arabidopsis thaliana PRT sequence of AT-RD26-2.
[0348] SEQID NO:342 is the Arabidopsis thaliana PRT sequence of AT-RHP6.
[0349] SEQID NO:343 is the Arabidopsis thaliana PRT sequence of AT-DTP1.
[0350] SEQID NO:344 is the Arabidopsis thaliana PRT sequence of AT-PPLDD.
[0351] SEQID NO:345 is the Arabidopsis thaliana PRT sequence of AT-NUCPU74.
[0352] SEQID NO:346 is the Arabidopsis thaliana PRT sequence of AT-MYB.
[0353] SEQID NO:347 is the Arabidopsis thaliana PRT sequence of AT-PAPR.
[0354] SEQID NO:348 is the Arabidopsis thaliana PRT sequence of AT-AT5G10000/FERREDOXIN.
[0355] SEQID NO:349 is the Arabidopsis thaliana PRT sequence of AT-PEPA.
[0356] SEQID NO:350 is the Arabidopsis thaliana PRT sequence of AT-NUCPU59.
[0357] SEQID NO:351 is the Arabidopsis thaliana PRT sequence of AT-RECPU3.
[0358] SEQID NO:352 is the Arabidopsis thaliana PRT sequence of AT-PP2B12.
[0359] SEQID NO:353 is the Arabidopsis thaliana PRT sequence of AT-DTP2.
[0360] SEQID NO:354 is the Arabidopsis thaliana PRT sequence of AT-SK11.
[0361] SEQID NO:355 is the Arabidopsis thaliana PRT sequence of AT-FBOX8.
[0362] SEQID NO:356 is the Arabidopsis thaliana PRT sequence of AT-UPM1.
[0363] SEQID NO:357 is the Arabidopsis thaliana PRT sequence of AT-C3HC4 ZF2.
[0364] SEQID NO:358 is the Arabidopsis thaliana PRT sequence of AT-C3HC4 ZF2.
[0365] SEQID NO:359 is the Arabidopsis thaliana PRT sequence of AT-PBP.
[0366] SEQID NO:360 is the Arabidopsis thaliana PRT sequence of AT-C2DP1.
[0367] SEQID NO:361 is the Arabidopsis thaliana PRT sequence of AT-NUCPU1.
[0368] SEQID NO:362 is the Arabidopsis thaliana PRT sequence of AT-NUCPU1B.
[0369] SEQID NO:363 is the Arabidopsis thaliana PRT sequence of AT-LPK.
[0370] SEQID NO:364 is the Arabidopsis thaliana PRT sequence of AT-CXE20.
[0371] SEQID NO:365 is the Arabidopsis thaliana PRT sequence of AT-DTP4 (=AT-CXE20).
[0372] SEQID NO:366 is the Zea mays PRT sequence of ZM-CTATP.
[0373] SEQID NO:367 is the Zea mays PRT sequence of ZM-HARDY.
[0374] SEQID NO:368 is the Zea mays PRT sequence of ZM-SIG2B.
[0375] SEQID NO:369 is the Zea mays PRT sequence of ZM-SRTF18.
[0376] SEQID NO:370 is the Zea mays PRT sequence of ZM-EIL6.
[0377] SEQID NO:371 is the Zea mays PRT sequence of ZM-UCP1.
[0378] SEQID NO:372 is the Zea mays PRT sequence of ZM-ALF1.
[0379] SEQID NO:373 is the Zea mays PRT sequence of ZM-NUCPU16.
[0380] SEQID NO:374 is the Zea mays PRT sequence of ZM-EER5.
[0381] SEQID NO:375 is the Zea mays PRT sequence of ZM-TMM.
[0382] SEQID NO:376 is the Zea mays PRT sequence of ZM-LRR-RK-P.
[0383] SEQID NO:377 is the Zea mays PRT sequence of VAC PPASE.
[0384] SEQID NO:378 is the Zea mays PRT sequence of ZM-ARP7.
[0385] SEQID NO:379 is the Zea mays PRT sequence of ZM-HP1.
[0386] SEQID NO:380 is the Zea mays PRT sequence of ZM-XERICO1.
[0387] SEQID NO:381 is the Zea mays PRT sequence of BETAEXPANSIN.
[0388] SEQID NO:382 is the Zea mays PRT sequence of ZM-MMS21.
[0389] SEQID NO:383 is the Zea mays PRT sequence of ZM-GA2 OXIDASE-LIKE.
[0390] SEQID NO:384 is the Zea mays PRT sequence of ZM-GA2 OXIDASE-LIKE PRO.
[0391] SEQID NO:385 is the Zea mays PRT sequence of ZM-XTH3.
[0392] SEQID NO:386 is the Zea mays PRT sequence of ZM-LOX6.
[0393] SEQID NO:387 is the Zea mays PRT sequence of ZM-NAP2.
[0394] SEQID NO:388 is the Zea mays PRT sequence of ZM-DOF11.
[0395] SEQID NO:389 is the Zea mays PRT sequence of ZM-TF-Q5SMY2.
[0396] SEQID NO:390 is the Zea mays PRT sequence of ZM-GS1-5.
[0397] SEQID NO:391 is the Zea mays PRT sequence of ZM-EX1.
[0398] SEQID NO:392 is the Zea mays PRT sequence of ZM-TOR.
[0399] SEQID NO:393 is the Zea mays PRT sequence of ZM-GS1-1.
[0400] SEQID NO:394 is the Zea mays PRT sequence of ZM-MACS6B.
[0401] SEQID NO:395 is the Zea mays PRT sequence of ZM-GCN2.
[0402] SEQID NO:396 is the Zea mays PRT sequence of ZM-ACO2.
[0403] SEQID NO:397 is the Zea mays PRT sequence of ZM-ASCORBATE PEROXIDASE.
[0404] SEQID NO:398 is the Zea mays PRT sequence of ZM-ACS6.
[0405] SEQID NO:399 is the Zea mays PRT sequence of ZM-MACS6A.
[0406] SEQID NO:400 is the Zea mays PRT sequence of ZM-PT5.
[0407] SEQID NO:401 is the Zea mays PRT sequence of ZM-T1N6.6.
[0408] SEQID NO:402 is the Zea mays PRT sequence of ZM-M47-V1.
[0409] SEQID NO:403 is the Zea mays PRT sequence of ZM-SVP3.
[0410] SEQID NO:404 is the Zea mays PRT sequence of ZM-PPDX.
[0411] SEQID NO:405 is the Zea mays PRT sequence of ZM-NRP1.
[0412] SEQID NO:406 is the Zea mays PRT sequence of ZM-RET2.
[0413] SEQID NO:407 is the Zea mays PRT sequence of ZM-ARGOS4.
[0414] SEQID NO:408 is the Zea mays PRT sequence of ZM-A0S1.
[0415] SEQID NO:409 is the Zea mays PRT sequence of ZM-GRF9.
[0416] SEQID NO:410 is the Zea mays PRT sequence of ZM-EIN2.
[0417] SEQID NO:411 is the Zea mays PRT sequence of ZM-AVP3.
[0418] SEQID NO:412 is the Zea mays PRT sequence of ZM-MADS56-V1.
[0419] SEQID NO:413 is the Zea mays PRT sequence of ZM-M-SV2A.
[0420] SEQID NO:414 is the Zea mays PRT sequence of ZM-LEA5.
[0421] SEQID NO:415 is the Zea mays PRT sequence of ZM-LBD1.
[0422] SEQID NO:416 is the Zea mays PRT sequence of ZM-C3HC4 RF1.
[0423] SEQID NO:417 is the Zea mays PRT sequence of ZM-RTA3.
[0424] SEQID NO:418 is the Zea mays PRT sequence of ZM-CYCLIN B2.2.
[0425] SEQID NO:419 is the Zea mays PRT sequence of ZM-RNAHEL.
[0426] SEQID NO:420 is the Zea mays PRT sequence of ZM-NPQ4.
[0427] SEQID NO:421 is the Zea mays PRT sequence of ZM-DP0780.
[0428] SEQID NO:422 is the Zea mays PRT sequence of ZM-ARABIDILLO-2.
[0429] SEQID NO:423 is the Zea mays PRT sequence of ZM-MADS32.
[0430] SEQID NO:424 is the Zea mays PRT sequence of ZM-ABA ACTIVATED KINASE1.
[0431] SEQID NO:425 is the Zea mays PRT sequence of ZM-MYB1.
[0432] SEQID NO:426 is the Zea mays PRT sequence of ZM-MYB2.
[0433] SEQID NO:427 is the Zea mays PRT sequence of ZM-MYB3R-2.
[0434] SEQID NO:428 is the Zea mays PRT sequence of ZM-PEPC.
[0435] SEQID NO:429 is the Zea mays PRT sequence of ZM-IPT2.
[0436] SEQID NO:430 is the Zea mays PRT sequence of ZM-CPCT(ALT).
[0437] SEQID NO:431 is the Zea mays PRT sequence of ZM-SDH3.
[0438] SEQID NO:432 is the Zea mays PRT sequence of SUCT.
[0439] SEQID NO:433 is the Zea mays PRT sequence of ZM-ARP6.
[0440] SEQID NO:434 is the Zea mays PRT sequence of ZM-PC4.
[0441] SEQID NO:435 is the Zea mays PRT sequence of ZM-CATALASE2.
[0442] SEQID NO:436 is the Zea mays PRT sequence of ZM-UBA-DELTA.
[0443] SEQID NO:437 is the Zea mays PRT sequence of ZM-AFB7.
[0444] SEQID NO:438 is the Zea mays PRT sequence of ZM-MCUPFB miRNA.
[0445] SEQID NO:439 is the Zea mays PRT sequence of ZM-DP0950.
[0446] SEQID NO:440 is the Zea mays PRT sequence of ZM-IPT1.
[0447] SEQID NO:441 is the Zea mays PRT sequence of ZM-IPT.
[0448] SEQID NO:442 is the Zea mays PRT sequence of ZM-PPC.
[0449] SEQID NO:443 is the Zea mays PRT sequence of ZM-PUB22.
[0450] SEQID NO:444 is the Zea mays PRT sequence of ZM-RBCS.
[0451] SEQID NO:445 is the Zea mays PRT sequence of ZM-SSU TP.
[0452] SEQID NO:446 is the Zea mays PRT sequence of ZM-PARP1.
[0453] SEQID NO:447 is the Zea mays PRT sequence of ZM-MBF1B.
[0454] SEQID NO:448 is the Zea mays PRT sequence of ZM-ZIM FP-LIKE.
[0455] SEQID NO:449 is the Zea mays PRT sequence of ZM-VRS1.
[0456] SEQID NO:450 is the Zea mays PRT sequence of ZM-ETA3.
[0457] SEQID NO:451 is the Zea mays PRT sequence of ZM-NRT1.1L2.
[0458] SEQID NO:452 is the Zea mays PRT sequence of ZM-CGS.
[0459] SEQID NO:453 is the Zea mays PRT sequence of ZM-GL1-V1.
[0460] SEQID NO:454 is the Zea mays PRT sequence of ZM-NAC7.
[0461] SEQID NO:455 is the Zea mays PRT sequence of ZM-ATG18.
[0462] SEQID NO:456 is the Zea mays PRT sequence of ZM-NAC5.
[0463] SEQID NO:457 is the Zea mays PRT sequence of ZM-ARDA.
[0464] SEQID NO:458 is the Zea mays PRT sequence of ZM-LEC1-LIKE.
[0465] SEQID NO:459 is the Zea mays PRT sequence of ZM-RR10.
[0466] SEQID NO:460 is the Zea mays PRT sequence of ZM-RR10 382-686.
[0467] SEQID NO:461 is the Zea mays PRT sequence of ZM-NAC010.
[0468] SEQID NO:462 is the Zea mays PRT sequence of ZM-ALDH7.
[0469] SEQID NO:463 is the Zea mays PRT sequence of ZM-MADS2.
[0470] SEQID NO:464 is the Zea mays PRT sequence of ZM-EBNA2.
[0471] SEQID NO:465 is the Zea mays PRT sequence of ZM-ARGOS3.
[0472] SEQID NO:466 is the Zea mays PRT sequence of ZM-EBF2.
[0473] SEQID NO:467 is the Zea mays PRT sequence of ZM-FBL2.
[0474] SEQID NO:468 is the Zea mays PRT sequence of ZM-PWWPDPL1.
[0475] SEQID NO:469 is the Zea mays PRT sequence of ZM-EDCP647011.
[0476] SEQID NO:470 is the Zea mays PRT sequence of ZM-GLYH.
[0477] SEQID NO:471 is the Zea mays PRT sequence of ZM-ODP2.
[0478] SEQID NO:472 is the Zea mays PRT sequence of ZM-MPG-V1.
[0479] SEQID NO:473 is the Zea mays PRT sequence of BRITTLE1.
[0480] SEQID NO:474 is the Zea mays PRT sequence of ZM-CHYR1-B.
[0481] SEQID NO:475 is the Zea mays PRT sequence of ZM-UPPS.
[0482] SEQID NO:476 is the Zea mays PRT sequence of ZM-ZMM28.
[0483] SEQID NO:477 is the Zea mays PRT sequence of ZM-SUS1.
[0484] SEQID NO:478 is the Zea mays PRT sequence of ZM-ALF2.
[0485] SEQID NO:479 is the Zea mays PRT sequence of ZM-HVA22E.
[0486] SEQID NO:480 is the Zea mays PRT sequence of ZM-SUMO E3.
[0487] SEQID NO:481 is the Zea mays PRT sequence of ZM-ERA1.
[0488] SEQID NO:482 is the Zea mays PRT sequence of ZM-FARNESYL TRANSF B.
[0489] SEQID NO:483 is the Zea mays PRT sequence of ZM-FARNESYL TRANSFERASE B.
[0490] SEQID NO:484 is the Zea mays PRT sequence of ZM-NAC87-2.
[0491] SEQID NO:485 is the Zea mays PRT sequence of ZM-COL.
[0492] SEQID NO:486 is the Zea mays PRT sequence of ZM-STPP3.
[0493] SEQID NO:487 is the Zea mays PRT sequence of ZM-ARGOS6.
[0494] SEQID NO:488 is the Zea mays PRT sequence of ZM-HMG.
[0495] SEQID NO:489 is the Zea mays PRT sequence of ZM-TREHALASE.
[0496] SEQID NO:490 is the Zea mays PRT sequence of ZM-WRKY67.
[0497] SEQID NO:491 is the Zea mays PRT sequence of ZM-NAR2.2.
[0498] SEQID NO:492 is the Zea mays PRT sequence of ZM-RT1.
[0499] SEQID NO:493 is the Zea mays PRT sequence of ZM-NAC1.
[0500] SEQID NO:494 is the Zea mays PRT sequence of ZM-CCCH.
[0501] SEQID NO:495 is the Zea mays PRT sequence of ZM-OBP3AL.
[0502] SEQID NO:496 is the Zea mays PRT sequence of ZM-ARGOS5.
[0503] SEQID NO:497 is the Zea mays PRT sequence of ZM-ARFGAP 1.
[0504] SEQID NO:498 is the Zea mays PRT sequence of ZM-DDA1.
[0505] SEQID NO:499 is the Zea mays PRT sequence of ZM-MYB.
[0506] SEQID NO:500 is the Zea mays PRT sequence of ZM-ADA2.
[0507] SEQID NO:501 is the Zea mays PRT sequence of ZM-GW3-1 (=ZM-BG1H1).
[0508] SEQID NO:502 is the Zea mays PRT sequence of ZM-ABA8OX1.
[0509] SEQID NO:503 is the Zea mays PRT sequence of ZM-PP2C.
[0510] SEQID NO:504 is the Zea mays PRT sequence of ZM-WILTY.
[0511] SEQID NO:505 is the Zea mays PRT sequence of ZM-EIL2.
[0512] SEQID NO:506 is the Zea mays PRT sequence of ZM-ARGOS8.
[0513] SEQID NO:507 is the Zea mays PRT sequence of ZM-WSPL1.
[0514] SEQID NO:508 is the Zea mays PRT sequence of ZM-DOF20.
[0515] SEQID NO:509 is the Zea mays PRT sequence of ZM-CBF1.
[0516] SEQID NO:510 is the Zea mays PRT sequence of ZM-RR2.
[0517] SEQID NO:511 is the Zea mays PRT sequence of ZM-XERICO2.
[0518] SEQID NO:512 is the Zea mays PRT sequence of ZM-TFL26.
[0519] SEQID NO:513 is the Zea mays PRT sequence of ZM-NUCPU3.
[0520] SEQID NO:514 is the Zea mays PRT sequence of ZM-ZF-Q75KW5.
[0521] SEQID NO:515 is the Zea mays PRT sequence of ZM-EFTU.
[0522] SEQID NO:516 is the Agrobacterium tumefaciens PRT sequence of BIP.
[0523] SEQID NO:517 is the Zea mays PRT sequence of ZM-PP2AC.
[0524] SEQID NO:518 is the Zea mays PRT sequence of ZM-BR1.
[0525] SEQID NO:519 is the Zea mays PRT sequence of ZM-EPF2A-MP.
[0526] SEQID NO:520 is the Zea mays PRT sequence of ZM-ARGOS.
[0527] SEQID NO:521 is the Zea mays PRT sequence of ZM-ARGOS1.
[0528] SEQID NO:522 is the Zea mays PRT sequence of ZM-ARGOS2.
[0529] SEQID NO:523 is the Zea mays PRT sequence of ZM-DET2.
[0530] SEQID NO:524 is the Zea mays PRT sequence of ZM-HP-Q94I52.
[0531] SEQID NO:525 is the Zea mays PRT sequence of ZM-EG8-LIKE.
[0532] SEQID NO:526 is the Zea mays PRT sequence of ZM-CKX2.
[0533] SEQID NO:527 is the Zea mays PRT sequence of ZM-YECPU2.
[0534] SEQID NO:528 is the Zea mays PRT sequence of ZM-ANR1.
[0535] SEQID NO:529 is the Zea mays PRT sequence of ZM-DRO1.
[0536] SEQID NO:530 is the Zea mays PRT sequence of ZM-DRO1.
[0537] SEQID NO:531 is the Zea mays PRT sequence of ZM-RAP2.7.
[0538] SEQID NO:532 is the Zea mays PRT sequence of ZM-GPCR.
[0539] SEQID NO:533 is the Zea mays PRT sequence of ZM-ERECTA.
[0540] SEQID NO:534 is the Zea mays PRT sequence of ZM-MYB1R1.
[0541] SEQID NO:535 is the Zea mays PRT sequence of ZM-GRF5.
[0542] SEQID NO:536 is the Zea mays PRT sequence of ZM-NAC21-5.
[0543] SEQID NO:537 is the Zea mays PRT sequence of ZM-GS1-3.
[0544] SEQID NO:538 is the Zea mays PRT sequence of ZM-SPS.
[0545] SEQID NO:539 is the Zea mays PRT sequence of ZM-MEZ2.
[0546] SEQID NO:540 is the Zea mays PRT sequence of ZM-PROG1 IR.
[0547] SEQID NO:541 is the Pichia angusta PRT sequence of YNT1 (PA) MO.
[0548] SEQID NO:542 is the Diplodia maydis PRT sequence of ACCD1 (DM).
[0549] SEQID NO:543 is the Artificial PRT sequence of ZM-TIC40 CTP1::CB-SOR Fusion
[0550] Zea mays; Clostridium beijerinckii.
[0551] SEQID NO:544 is the Artificial PRT sequence of ZM-LHC 1-680 CTP1::CB-SOR (NO MET) Fusion Zea mays; Clostridium beijerinckii.
[0552] SEQID NO:545 is the Zea mays PRT sequence of ZM-MSRB2.
[0553] SEQID NO:546 is the Zea mays PRT sequence of ZM-RR5.
[0554] SEQID NO:547 is the Zea mays PRT sequence of ZM-CB5A.
[0555] SEQID NO:548 is the Saccharomyces cerevisiae PRT sequence of SC-RER2.
[0556] SEQID NO:549 is the Zea mays PRT sequence of ZM-ASA1.
[0557] SEQID NO:550 is the Sorghum bicolor PRT sequence of SB-C4PEPC.
[0558] SEQID NO:551 is the Clostridium beijerinckii PRT sequence of CB-SOR.
[0559] SEQID NO:552 is the Sorghum bicolor PRT sequence of SB-STPP3-4.
[0560] SEQID NO:553 is the Zea mays PRT sequence of ZM-LEA4-2.
[0561] SEQID NO:554 is the Zea mays PRT sequence of ZM-EPFL9.
[0562] SEQID NO:555 is the Ustilago maydis PRT sequence of UM-SUC2.
[0563] SEQID NO:556 is the Ustilago maydis PRT sequence of UM-03605.
[0564] SEQID NO:557 is the Zea mays PRT sequence of ZM-ABI5.
[0565] SEQID NO:558 is the Agrobacterium tumefaciens PRT sequence of IPT.
[0566] SEQID NO:559 is the Oryza sativa PRT sequence of OS-GST (DP0055).
[0567] SEQID NO:560 is the Oryza sativa PRT sequence of OS-NUECP8.
[0568] SEQID NO:561 is the Oryza sativa PRT sequence of OS-TIM17.
[0569] SEQID NO:562 is the Oryza sativa PRT sequence of OS-ARGOS(MOD1).
[0570] SEQID NO:563 is the Oryza sativa PRT sequence of OS-DP0691-V1.
[0571] SEQID NO:564 is the Oryza sativa PRT sequence of OS-MADS18.
[0572] SEQID NO:565 is the Oryza sativa PRT sequence of OS-NUECP2.
[0573] SEQID NO:566 is the Oryza sativa PRT sequence of OS-DP1013.
[0574] SEQID NO:567 is the Oryza sativa PRT sequence of OS-DP1002.

### DETAILED DESCRIPTION

[0575] Terms used in the claims and specification are defined as set forth below unless otherwise specified. It must be noted that, as used in the specification and the appended claims, the singular forms “a,” “an” and “the” include plural referents unless the context clearly dictates otherwise.

[0576] The term ‘Agronomic Traits’ has varied definitions. Herein we use the term Agronomic traits chiefly to loosely refer to trait targets yield enhancement (YE), drought tolerance (DRT), and nitrogen use efficiency (NUE), all three of which have varied definitions and complex interrelationships. Occasionally it includes other component traits involving plant architecture, maturity traits, and physiological traits driving intrinsic plant performances such as photosynthetic efficiency. Collectively Agronomic Traits broadly includes many mechanisms, whether molecular or physiological, touching diverse aspects of plant biology.

[0577] The present disclosure provides a commodity plant product, as well as methods for producing a commodity plant product, that is derived from a plant of the present disclosure. As used herein, a “commodity plant product” refers to any composition or product that is comprised of material derived from a plant, seed, plant cell, or plant element of the present disclosure. Commodity plant products may be sold to consumers and can be viable or nonviable. Nonviable commodity products include but are not limited to nonviable plant elements and grains; processed seeds, seed parts, and plant elements; dehydrated plant tissue, frozen plant tissue, and processed plant tissue; seeds and plant elements processed for animal feed for terrestrial and/or aquatic animal consumption, oil, meal, flour, flakes, bran, fiber, paper, tea, coffee, silage, crushed of whole grain, and any other food for human or animal consumption such as the fruit or other edible portion of the plant; and biomasses and fuel products; and raw material in industry.

[0578] “Biomass” means the total mass or weight (fresh or dry), at a given time, of a plant tissue, plant tissues, an entire plant, or population of plants. Biomass is usually given as weight per unit area.

[0579] The term “isoline” is a comparative term, and references organisms that are genetically identical, but may differ in treatment. In one example, two genetically identical maize plant embryos may be separated into two different groups, one receiving a treatment (such as transformation with a heterologous polynucleotide, to create a genetically modified plant) and one control that does not receive such treatment. Any phenotypic differences between the two groups may thus be attributed solely to the treatment and not to any inherency of the plant's genetic makeup. Any phenotypic differences between the plants derived from (e.g., grown from or obtained from) those seeds may be attributed to the treatment, thus forming an isoline comparison.

[0580] Similarly, by the term “reference agricultural plant,” it is meant an agricultural plant of the same species, strain, or cultivar to which a transgene, treatment, formulation, composition or preparation as described herein is not administered/contacted. A reference agricultural plant, therefore, is identical to the treated plant with the exception of the presence of the transgene and can serve as a control for detecting the effects of the transgene that is conferred to the plant.

[0581] A “reference environment” refers to the environment, treatment or condition of the plant in which a measurement is made. For example, production of a compound in a plant associated with a transgene can be measured in a reference environment of drought stress, and compared with the levels of the compound in a reference agricultural plant under the same conditions of drought stress. Alternatively, the levels of a compound in plant associated with a transgene and reference agricultural plant can be measured under identical conditions of no stress.

[0582] A “plant element” is intended to generically reference either a whole plant or a plant component, including but not limited to plant tissues, parts, and cell types. A plant element is preferably one of the following: whole plant, seedling, meristematic tissue, ground tissue, vascular tissue, dermal tissue, seed, leaf, root, shoot, stem, flower, fruit, stolon, bulb, tuber, corm, kelkis, shoot, bud. As used herein, a “plant element” is synonymous to a “portion” of a plant, and refers to any part of the plant, and can include distinct tissues and/or organs, and may be used interchangeably with the term “tissue” throughout.

[0583] Similarly, a “plant reproductive element” is intended to generically reference any part of a plant that is able to initiate other plants via either sexual or asexual reproduction of that plant, for example but not limited to: seed, seedling, root, shoot, cutting, scion, graft, stolon, bulb, tuber, corm, keikis, or bud.

[0584] A “population” of plants refers to more than one plant, that are of the same taxonomic category, typically be of the same species, and will also typically share a common genetic derivation.

[0585] As used herein, the terms “water-limited condition” and “drought condition,” or “water-limited” and “drought,” may be used interchangeably. For example, a method or composition for improving a plant's ability to grow under drought conditions means the same as the ability to grow under water-limited conditions. In such cases, the plant can be further said to display improved tolerance to drought stress.

[0586] As used herein, the terms “normal watering” and “well-watered” are used interchangeably, to describe a plant grown under typical growth conditions with no water restriction.

[0587] An “increased yield” can refer to any increase in biomass or seed or fruit weight, seed size, seed number per plant, seed number per unit area, bushels per acre, tons per acre, kilo per hectare, or carbohydrate yield. Typically, the particular characteristic is designated when referring to increased yield, e.g., increased grain yield or increased seed size.

[0588] “Agronomic trait potential” is intended to mean a capability of a plant element for exhibiting a phenotype, preferably an improved agronomic trait, at some point during its life cycle, or conveying said phenotype to another plant element with which it is associated in the same plant. For example, a plant element may comprise a transgene that will provide benefit to leaf tissue of a plant from which the plant element is grown; in such case, the plant element comprising such a transgene has the agronomic trait potential for a particular phenotype (for example, increased biomass in the plant) even if the plant element itself does not display said phenotype.

[0589] “Introducing” is intended to mean presenting to the host cell, plant, plant cell or plant part the polynucleotide or polypeptide in such a manner that the sequence gains access to the interior of a cell of the plant or organism

[0590] “Heterologous” in reference to a sequence is a sequence that originates from a foreign species or, if from the same species, is substantially modified from its native form in composition and/or genomic locus by deliberate human intervention. For example, a promoter operably linked to a heterologous polynucleotide is from a species different from the species from which the polynucleotide was derived, or, if from the same/analogous species, one or both are substantially modified from their original form and/or genomic locus, or the promoter is not the native promoter for the operably linked polynucleotide.

[0591] “Isolated” nucleic acid molecule (or DNA) is used herein to refer to a nucleic acid sequence (or DNA) that is no longer in its natural environment, for example in an in vitro or in a heterologous recombinant bacterial or plant host cell. An isolated nucleic acid molecule, or biologically active portion thereof, is substantially free of other cellular material or culture medium when produced by recombinant techniques, or substantially free of chemical precursors or other chemicals when chemically synthesized. An isolated nucleic acid is free of sequences (optimally protein encoding sequences) that naturally flank the nucleic acid (i.e., sequences located at the 5′ and 3′ ends of the nucleic acid) in the genomic DNA of the organism from which the nucleic acid is derived.

[0592] “Operably linked” refers to the association of two or more nucleic acid fragments on a single nucleic acid fragment so that the function of one is affected by the other. For example, a promoter is operably linked with a coding sequence when it is capable of affecting the expression of that coding sequence (i.e., that the coding sequence is under the transcriptional control of the promoter). Coding sequences can be operably linked to regulatory sequences in sense or antisense orientation

[0593] “Polynucleotide” is not intended to limit the present disclosure to polynucleotides comprising DNA or RNA. Such deoxyribonucleotides and ribonucleotides include both naturally occurring molecules and synthetic analogues. The polynucleotides disclosed herein also encompass all forms of sequences including, but not limited to, single-stranded forms, double-stranded forms, hairpins, stem-and-loop structures, and the like.

[0594] By “promoter” is intended a regulatory region of DNA capable of regulating the transcription of a sequence operably linked thereto. It usually comprises a TATA box capable of directing RNA polymerase II to initiate RNA synthesis at the appropriate transcription initiation site for a particular coding sequence.

[0595] “Recombinant” refers to an artificial combination of two otherwise separated segments of sequence, e.g., by chemical synthesis, or manipulation of isolated segments of nucleic acids by genetic engineering techniques.

[0596] “Percent (%) sequence identity” or “percent identity”, with respect to a reference sequence (subject), is determined as the percentage of amino acid residues or nucleotides in a candidate sequence (query) that are identical with the respective amino acid residues or nucleotides in the reference sequence, after aligning the sequences and introducing gaps, if necessary, to achieve the maximum percent sequence identity, and not considering any amino acid conservative substitutions as part of the sequence identity. Alignment for purposes of determining percent sequence identity can be achieved in various ways that are within the skill in the art, for instance, using publicly available computer software such as BLAST, BLAST-2. Those skilled in the art can determine appropriate parameters for aligning sequences, including any algorithms needed to achieve maximal alignment over the full length of the sequences being compared. The percent identity between the two sequences is a function of the number of identical positions shared by the sequences (e.g., percent identity of query sequence=number of identical positions between query and subject sequences/total number of positions of query sequence×100).

[0597] “Introgression” refers to the transmission of a desired allele of a genetic locus from one genetic background to another. For example, introgression of a desired allele at a specified locus can be transmitted to at least one progeny via a sexual cross between two parents of the same species, where at least one of the parents has the desired allele in its genome. Alternatively, for example, transmission of an allele can occur by recombination between two donor genomes, e.g., in a fused protoplast, where at least one of the donor protoplasts has the desired allele in its genome. The desired allele can be, e.g., detected by a marker that is associated with a phenotype, at a QTL, a transgene, or the like. Offspring comprising the desired allele may be repeatedly backcrossed to a line having a desired genetic background and selected for the desired allele, to result in the allele becoming fixed in a selected genetic background.

[0598] “Plant” generically includes whole plants, plant organs, plant tissues, seeds, plant cells, seeds and progeny of the same. The plant is a monocot or dicot. Plant cells include, without limitation, cells from seeds, suspension cultures, embryos, meristematic regions, callus tissue, leaves, roots, shoots, gametophytes, sporophytes, pollen and microspores. A plant element” is intended to reference either a whole plant or a plant component, which may comprise differentiated and/or undifferentiated tissues, for example but not limited to plant tissues, parts, and cell types. In one embodiment, a plant element is one of the following: whole plant, seedling, meristematic tissue, ground tissue, vascular tissue, dermal tissue, seed, leaf, root, shoot, stem, flower, fruit, stolon, bulb, tuber, corm, keiki, shoot, bud, tumor tissue, and various forms of cells and culture (e.g., single cells, protoplasts, embryos, callus tissue). It should be noted that a protoplast is not technically “intact” plant cell (as naturally found with all components), as protoplasts lack a cell wall. plant organ” refers to plant tissue or a group of tissues that constitute a morphologically and functionally distinct part of a plant. a plant element” is synonymous to a portion” of a plant, and refers to any part of the plant, and can include distinct tissues and/or organs, and may be used interchangeably with tissue” throughout. Similarly, a plant reproductive element” is intended to generically reference any part of a plant that is able to initiate other plants via either sexual or asexual reproduction of that plant, for example but not limited to: seed, seedling, root, shoot, cutting, scion, graft, stolon, bulb, tuber, corm, keiki, or bud. The plant element may be in plant or in a plant organ, tissue culture, or cell culture.

[0599] “Subject plant” or “subject plant cell” is one in which genetic alteration, such as transformation, has been effected as to a gene of interest, or is a plant or plant cell which is descended from a plant or cell so altered and which comprises the alteration.

[0600] “Stable transformation” is a transformation in which the polynucleotide construct introduced into a plant integrates into the genome of the plant and is capable of being inherited by the progeny thereof

[0601] “Transient transformation” means that a polynucleotide is introduced into the plant and does not integrate into the genome of the plant.

[0602] “Trait” refers to a physiological, morphological, biochemical, or physical characteristic of a plant or particular plant material or cell. In some instances, this characteristic is visible to the human eye, such as seed or plant size, or can be measured by biochemical techniques, such as detecting the protein, starch, or oil content of seed or leaves, or by observation of a metabolic or physiological process, e.g. by measuring uptake of carbon dioxide, or by the observation of the expression level of a gene or genes, e.g., by employing Northern analysis, RT-PCR, microarray gene expression assays, or reporter gene expression systems, or by agricultural observations such as stress tolerance, yield, or pathogen tolerance.

### Recombinant Constructs and Transformation of Cells

[0603] Standard recombinant DNA and molecular cloning techniques used herein are well known in the art and are described more fully in Sambrook et al., Molecular Cloning: A Laboratory Manual; Cold Spring Harbor Laboratory: Cold Spring Harbor, N.Y. (1989). Transformation methods are well known to those skilled in the art and are described infra.

[0604] Vectors and constructs include circular plasmids, and linear polynucleotides, comprising a polynucleotide of interest and optionally other components including linkers, adapters, regulatory or analysis. In some examples a recognition site and/or target site can be comprised within an intron, coding sequence, 5′ UTRs, 3′ UTRs, and/or regulatory regions.

### Polynucleotides of Interest

[0605] Polynucleotides of interest are further described herein and include polynucleotides reflective of the commercial markets and interests of those involved in the development of the crop. Crops and markets of interest change, and as developing nations open up world markets, new crops and technologies will emerge also. In addition, as our understanding of agronomic traits and characteristics such as yield and heterosis increase, the choice of genes for genetic engineering will change accordingly.

[0606] General categories of polynucleotides of interest include, for example, genes of interest involved in information, such as zinc fingers, those involved in communication, such as kinases, and those involved in housekeeping, such as heat shock proteins. More specific polynucleotides of interest include, but are not limited to, genes involved in traits of agronomic interest such as but not limited to: crop yield, grain quality, crop nutrient content, starch and carbohydrate quality and quantity as well as those affecting kernel size, sucrose loading, protein quality and quantity, nitrogen fixation and/or utilization, fatty acid and oil composition, genes encoding proteins conferring resistance to abiotic stress (such as drought, nitrogen, temperature, salinity, toxic metals or trace elements, or those conferring resistance to toxins such as pesticides and herbicides), genes encoding proteins conferring resistance to biotic stress (such as attacks by fungi, viruses, bacteria, insects, and nematodes, and development of diseases associated with these organisms).

[0607] Agronomically important traits such as oil, starch, and protein content can be genetically altered in addition to using traditional breeding methods. Modifications include increasing content of oleic acid, saturated and unsaturated oils, increasing levels of lysine and sulfur, providing essential amino acids, and also modification of starch. Hordothionin protein modifications are described in U.S. Pat. Nos. 5,703,049, 5,885,801, 5,885,802, and 5,990,389.

[0608] Polynucleotide sequences of interest may encode proteins involved in providing disease or pest resistance. By “disease resistance” or “pest resistance” is intended that the plants avoid the harmful symptoms that are the outcome of the plant-pathogen interactions. Pest resistance genes may encode resistance to pests that have great yield drag such as rootworm, cutworm, European Corn Borer, and the like. Disease resistance and insect resistance genes such as lysozymes or cecropins for antibacterial protection, or proteins such as defensins, glucanases or chitinases for antifungal protection, or Bacillus thuringiensis endotoxins, protease inhibitors, collagenases, lectins, or glycosidases for controlling nematodes or insects are all examples of useful gene products. Genes encoding disease resistance traits include detoxification genes, such as against fumonisin (U.S. Pat. No. 5,792,931); avirulence (avr) and disease resistance (R) genes (Jones et al. (1994) Science 266:789; Martin et al. (1993) Science 262:1432; and Mindrinos et al. (1994) Cell 78:1089); and the like. Insect resistance genes may encode resistance to pests that have great yield drag such as rootworm, cutworm, European Corn Borer, and the like. Such genes include, for example, Bacillus thuringiensis toxic protein genes (U.S. Pat. Nos. 5,366,892; 5,747,450; 5,736,514; 5,723,756; 5,593,881; and Geiser et al (1986) Gene 48:109); and the like.

[0609] An “herbicide resistance protein” or a protein resulting from expression of an “herbicide resistance-encoding nucleic acid molecule” includes proteins that confer upon a cell the ability to tolerate a higher concentration of an herbicide than cells that do not express the protein, or to tolerate a certain concentration of an herbicide for a longer period of time than cells that do not express the protein. Herbicide resistance traits may be introduced into plants by genes coding for resistance to herbicides that act to inhibit the action of acetolactate synthase (ALS, also referred to as acetohydroxyacid synthase, AHAS), in particular the sulfonylurea (UK: sulphonylurea) type herbicides, genes coding for resistance to herbicides that act to inhibit the action of glutamine synthase, such as phosphinothricin or basta (e.g., the bar gene), glyphosate (e.g., the EPSP synthase gene and the GAT gene), HPPD inhibitors (e.g, the HPPD gene) or other such genes known in the art. See, for example, U.S. Pat. Nos. 7,626,077, 5,310,667, 5,866,775, 6,225,114, 6,248,876, 7,169,970, 6,867,293, and 9,187,762. The bar gene encodes resistance to the herbicide basta, the nptII gene encodes resistance to the antibiotics kanamycin and geneticin, and the ALS-gene mutants encode resistance to the herbicide chlorsulfuron.

[0610] Furthermore, it is recognized that the polynucleotide of interest may also comprise antisense sequences complementary to at least a portion of the messenger RNA (mRNA) for a targeted gene sequence of interest. Antisense nucleotides are constructed to hybridize with the corresponding mRNA. Modifications of the antisense sequences may be made as long as the sequences hybridize to and interfere with expression of the corresponding mRNA. In this manner, antisense constructions having 70%, 80%, or 85% sequence identity to the corresponding antisense sequences may be used. Furthermore, portions of the antisense nucleotides may be used to disrupt the expression of the target gene. Generally, sequences of at least 50 nucleotides, 100 nucleotides, 200 nucleotides, or greater may be used.

[0611] In addition, the polynucleotide of interest may also be used in the sense orientation to suppress the expression of endogenous genes in plants. Methods for suppressing gene expression in plants using polynucleotides in the sense orientation are known in the art. The methods generally involve transforming plants with a DNA construct comprising a promoter that drives expression in a plant operably linked to at least a portion of a nucleotide sequence that corresponds to the transcript of the endogenous gene. Typically, such a nucleotide sequence has substantial sequence identity to the sequence of the transcript of the endogenous gene, generally greater than about 65% sequence identity, about 85% sequence identity, or greater than about 95% sequence identity. See U.S. Pat. Nos. 5,283,184 and 5,034,323.

[0612] The polynucleotide of interest can also be a phenotypic marker. A phenotypic marker is screenable or a selectable marker that includes visual markers and selectable markers whether it is a positive or negative selectable marker. Any phenotypic marker can be used. Specifically, a selectable or screenable marker comprises a DNA segment that allows one to identify, or select for or against a molecule or a cell that comprises it, often under particular conditions. These markers can encode an activity, such as, but not limited to, production of RNA, peptide, or protein, or can provide a binding site for RNA, peptides, proteins, inorganic and organic compounds or compositions and the like.

[0613] Examples of selectable markers include, but are not limited to, DNA segments that comprise restriction enzyme sites; DNA segments that encode products which provide resistance against otherwise toxic compounds including antibiotics, such as, spectinomycin, ampicillin, kanamycin, tetracycline, Basta, neomycin phosphotransferase II (NEO) and hygromycin phosphotransferase (HPT)); DNA segments that encode products which are otherwise lacking in the recipient cell (e.g., tRNA genes, auxotrophic markers); DNA segments that encode products which can be readily identified (e.g., phenotypic markers such as β-galactosidase, GUS; fluorescent proteins such as green fluorescent protein (GFP), cyan (CFP), yellow (YFP), red (RFP), and cell surface proteins); the generation of new primer sites for PCR (e.g., the juxtaposition of two DNA sequence not previously juxtaposed), the inclusion of DNA sequences not acted upon or acted upon by a restriction endonuclease or other DNA modifying enzyme, chemical, etc.; and, the inclusion of a DNA sequences required for a specific modification (e.g., methylation) that allows its identification.

[0614] Additional selectable markers include genes that confer resistance to herbicidal compounds, such as sulphonylureas, glufosinate ammonium, bromoxynil, imidazolinones, and 2,4-dichlorophenoxyacetate (2,4-D). See for example, Acetolactase synthase (ALS) for resistance to sulfonylureas, imidazolinones, triazolopyrimidine sulfonamides, pyrimidinylsalicylates and sulphonylaminocarbonyl-triazolinones (Shaner and Singh, 1997, Herbicide Activity: Toxicol Biochem Mol Biol 69-110); glyphosate resistant 5-enolpyruvylshikimate-3-phosphate (EPSPS) (Saroha et al. 1998, J. Plant Biochemistry & Biotechnology Vol 7:65-72);

[0615] Polynucleotides of interest includes genes that can be stacked or used in combination with other traits, such as but not limited to herbicide resistance or any other trait described herein. Polynucleotides of interest and/or traits can be stacked together in a complex trait locus as described in US20130263324 published 3 Oct. 2013 and in WO/2013/112686, published 1 Aug. 2013.

[0616] A polypeptide of interest includes any protein or polypeptide that is encoded by a polynucleotide of interest described herein.

[0617] Further provided are methods for identifying at least one plant cell, comprising in its genome, a polynucleotide of interest integrated at the target site. A variety of methods are available for identifying those plant cells with insertion into the genome at or near to the target site. Such methods can be viewed as directly analyzing a target sequence to detect any change in the target sequence, including but not limited to PCR methods, sequencing methods, nuclease digestion, Southern blots, and any combination thereof. See, for example, US20090133152 published 21 May 2009. The method also comprises recovering a plant from the plant cell comprising a polynucleotide of interest integrated into its genome. The plant may be sterile or fertile. It is recognized that any polynucleotide of interest can be provided, integrated into the plant genome at the target site, and expressed in a plant.

### Optimization of Sequences for Expression in Plants

[0618] Methods are available in the art for synthesizing plant-preferred genes. See, for example, U.S. Pat. Nos. 5,380,831, and 5,436,391, and Murray et al. (1989) Nucleic Acids Res. 17:477-498. Additional sequence modifications are known to enhance gene expression in a plant host. These include, for example, elimination of: one or more sequences encoding spurious polyadenylation signals, one or more exon-intron splice site signals, one or more transposon-like repeats, and other such well-characterized sequences that may be deleterious to gene expression. The G-C content of the sequence may be adjusted to levels average for a given plant host, as calculated by reference to known genes expressed in the host plant cell. When possible, the sequence is modified to avoid one or more predicted hairpin secondary mRNA structures. Thus, “a plant-optimized nucleotide sequence” of the present disclosure comprises one or more of such sequence modifications.

### Expression Elements

[0619] Any polynucleotide encoding a Cas protein, other CRISPR system component, or other polynucleotide disclosed herein may be functionally linked to a heterologous expression element, to facilitate transcription or regulation in a host cell. Such expression elements include but are not limited to: promoter, leader, intron, and terminator. Expression elements may be “minimal”—meaning a shorter sequence derived from a native source, that still functions as an expression regulator or modifier. Alternatively, an expression element may be “optimized”—meaning that its polynucleotide sequence has been altered from its native state in order to function with a more desirable characteristic in a particular host cell (for example, but not limited to, a bacterial promoter may be “maize-optimized” to improve its expression in corn plants). Alternatively, an expression element may be “synthetic”—meaning that it is designed in silico and synthesized for use in a host cell. Synthetic expression elements may be entirely synthetic, or partially synthetic (comprising a fragment of a naturally-occurring polynucleotide sequence).

[0620] It has been shown that certain promoters are able to direct RNA synthesis at a higher rate than others. These are called “strong promoters”. Certain other promoters have been shown to direct RNA synthesis at higher levels only in particular types of cells or tissues and are often referred to as “tissue specific promoters”, or “tissue-preferred promoters” if the promoters direct RNA synthesis preferably in certain tissues but also in other tissues at reduced levels.

[0621] A plant promoter includes a promoter capable of initiating transcription in a plant cell. For a review of plant promoters, see, Potenza et al., 2004, In vitro Cell Dev Biol 40:1-22; Porto et al., 2014, Molecular Biotechnology (2014), 56(1), 38-49.

[0622] Constitutive promoters include, for example, the core CaMV 35S promoter (Odell et al., (1985) Nature 313:810-2); rice actin (McElroy et al., (1990) Plant Cell 2:163-71); ubiquitin (Christensen et al., (1989) Plant Mol Biol 12:619-32; ALS promoter (U.S. Pat. No. 5,659,026) and the like. Tissue-preferred promoters can be utilized to target enhanced expression within a particular plant tissue. Seed-preferred promoters include both seed-specific promoters active during seed development, as well as seed-germinating promoters active during seed germination. Chemical inducible (regulated) promoters can be used to modulate the expression of a gene in a prokaryotic and eukaryotic cell or organism through the application of an exogenous chemical regulator. The promoter may be a chemical-inducible promoter, where application of the chemical induces gene expression, or a chemical-repressible promoter, where application of the chemical represses gene expression. Pathogen inducible promoters induced following infection by a pathogen include, but are not limited to those regulating expression of PR proteins, SAR proteins, beta-1,3-glucanase, chitinase, etc. A stress-inducible promoter includes the RD29A promoter (Kasuga et al. (1999) Nature Biotechnol. 17:287-91). One of ordinary skill in the art is familiar with protocols for simulating stress conditions such as drought, osmotic stress, salt stress and temperature stress and for evaluating stress tolerance of plants that have been subjected to simulated or naturally-occurring stress conditions.

[0623] New promoters of various types useful in plant cells are constantly being discovered; numerous examples may be found in the compilation by Okamuro and Goldberg, (1989) In The Biochemistry of Plants, Vol. 115, Stumpf and Conn, eds (New York, N.Y.: Academic Press), pp. 1-82.

### Morphogenic Factors

[0624] A morphogenic factor (gene or protein)—also referred to as a “developmental gene”—may be involved in plant metabolism, organ development, stem cell development, cell growth stimulation, organogenesis, somatic embryogenesis initiation, accelerated somatic embryo maturation, initiation and/or development of the apical meristem, initiation and/or development of shoot meristem, or a combination thereof. Introduction of one or more morphogenic factors may improve the frequency or efficiency of transformation or embryogenesis.

[0625] In some aspects, the morphogenic factor is a molecule selected from one or more of the following categories: 1) cell cycle stimulatory polynucleotides including plant viral replicase genes such as RepA, cyclins, E2F, prolifera, cdc2 and cdc25; 2) developmental polynucleotides such as Lec1, Kn1 family, WUSCHEL, Zwille, BBM, Aintegumenta (ANT), FUS3, and members of the Knotted family, such as Kn1, STM, OSH1, and SbH1; 3) anti-apoptosis polynucleotides such as CED9, Bcl2, Bcl-X(L), Bcl-W, A1, McL-1, Mac1, Boo, and Bax-inhibitors; 4) hormone polynucleotides such as IPT, TZS, and CKI-1; and 5) silencing constructs targeted against cell cycle repressors, such as Rb, CK1, prohibitin, and wee1, or stimulators of apoptosis such as APAF-1, bad, bax, CED-4, and caspase-3, and repressors of plant developmental transitions, such as Pickle and WD polycomb genes including FIE and Medea. The polynucleotides can be silenced by any known method such as antisense, RNA interference, cosuppression, chimerplasty, or transposon insertion.

[0626] In some aspects, the morphogenic gene is a member of the WUS/WOX gene family (WUS1, WUS2, WUS3, WOX2A, WOX4, WOX5, or WOX9) see U.S. Pat. Nos. 7,348,468 and 7,256,322 and United States Patent Application publications 20170121722 and 20070271628.

[0627] In some embodiments, the morphogenic gene or protein is a member of the AP2/ERF family of proteins.

[0628] In some embodiments, the morphogenic factor is a babyboom (BBM) polypeptide, which is a member of the AP2 family of transcription factors.

### Cas Endonucleases and Effectors

[0629] Endonucleases are enzymes that cleave the phosphodiester bond within a polynucleotide chain, and include restriction endonucleases that cleave DNA at specific sites without damaging the bases. Examples of endonucleases include restriction endonucleases, meganucleases, TAL effector nucleases (TALENs), zinc finger nucleases, and Cas (CRISPR-associated) effector endonucleases.

[0630] Cas endonucleases, either as single effector proteins or in an effector complex with other components, unwind the DNA duplex at the target sequence and optionally cleave at least one DNA strand, as mediated by recognition of the target sequence by a polynucleotide (such as, but not limited to, a crRNA or guide RNA) that is in complex with the Cas effector protein. Such recognition and cutting of a target sequence by a Cas endonuclease typically occurs if the correct protospacer-adjacent motif (PAM) is located at or adjacent to the 3′ end of the DNA target sequence. Alternatively, a Cas endonuclease herein may lack DNA cleavage or nicking activity, but can still specifically bind to a DNA target sequence when complexed with a suitable RNA component. (See also U.S. Patent Application US20150082478 published 19 Mar. 2015 and US20150059010 published 26 Feb. 2015).

[0631] Cas endonucleases may occur as individual effectors (Class 2 CRISPR systems) or as part of larger effector complexes (Class I CRISPR systems).

[0632] Cas endonucleases that have been described include, but are not limited to, for example: Cas3 (a feature of Class 1 type I systems), Cas9 (a feature of Class 2 type II systems) and Cas12 (Cpf1) (a feature of Class 2 type V systems).

[0633] Cas endonucleases and effector proteins can be used for targeted genome editing (via simplex and multiplex double-strand breaks and nicks) and targeted genome regulation (via tethering of epigenetic effector domains to either the Cas protein or sgRNA. A Cas endonuclease can also be engineered to function as an RNA-guided recombinase, and via RNA tethers could serve as a scaffold for the assembly of multiprotein and nucleic acid complexes (Mali et al., 2013, Nature Methods Vol. 10:957-963).

[0634] Cas endonucleases, when complexed with a cognate guide RNA, recognize, bind to, and optionally nick or cleave a target polynucleotide.

[0635] A Cas endonuclease, effector protein, or functional fragment thereof, for use in the disclosed methods, can be isolated from a native source, or from, a recombinant source where the genetically modified host cell is modified to express the nucleic acid sequence encoding the protein. Alternatively, the Cas protein can be produced using cell free protein expression systems, or be synthetically produced. Effector Cas nucleases may be isolated and introduced into a heterologous cell, or may be modified from its native form to exhibit a different type or magnitude of activity than what it would exhibit in its native source. Such modifications include but are not limited to: fragments, variants, substitutions, deletions, and insertions.

[0636] Fragments and variants of Cas endonucleases and Cas effector proteins can be obtained via methods such as site-directed mutagenesis and synthetic construction. Methods for measuring endonuclease activity are well known in the art such as, but not limiting to, WO2013166113 published 7 Nov. 2013, WO2016186953 published 24 Nov. 2016, and WO2016186946 published 24 Nov. 2016.

[0637] The Cas endonuclease can comprise a modified form of the Cas polypeptide. The modified form of the Cas polypeptide can include an amino acid change (e.g., deletion, insertion, or substitution) that reduces the naturally-occurring nuclease activity of the Cas protein. For example, in some instances, the modified form of the Cas protein has less than 50%, less than 40%, less than 30%, less than 20%, less than 10%, less than 5%, or less than 1% of the nuclease activity of the corresponding wild-type Cas polypeptide (US20140068797 published 6 Mar. 2014). In some cases, the modified form of the Cas polypeptide has no substantial nuclease activity and is referred to as catalytically “inactivated Cas” or “deactivated Cas (dCas).” An inactivated Cas/deactivated Cas includes a deactivated Cas endonuclease (dCas). A catalytically inactive Cas effector protein can be fused to a heterologous sequence to induce or modify activity.

[0638] A catalytically active or inactive Cas protein, such as the Cas-alpha protein described herein, can also be in fusion with a molecule that directs editing of single or multiple bases in a polynucleotide sequence, for example a site-specific deaminase that can change the identity of a nucleotide, for example from C·G to T·A or an A·T to G·C (Gaudelli et al., Programmable base editing of A·T to G·C in genomic DNA without DNA cleavage.” Nature (2017); Nishida et al. “Targeted nucleotide editing using hybrid prokaryotic and vertebrate adaptive immune systems.” Science 353 (6305) (2016); Komor et al. “Programmable editing of a target base in genomic DNA without double-stranded DNA cleavage.” Nature 533 (7603) (2016):420-4. A base editing fusion protein may comprise, for example, an active (double strand break creating), partially active (nickase) or deactivated (catalytically inactive) Cas-alpha endonuclease and a deaminase (such as, but not limited to, a cytidine deaminase, an adenine deaminase, APOBEC1, APOBEC3A, BE2, BE3, BE4, ABEs, or the like). Base edit repair inhibitors and glycosylase inhibitors (e.g., uracil glycosylase inhibitor (to prevent uracil removal)) are contemplated as other components of a base editing system, in some embodiments.

### Guide Polynucleotides

[0639] The guide polynucleotide enables target recognition, binding, and optionally cleavage by the Cas endonuclease, and can be a single molecule or a double molecule. The guide polynucleotide sequence can be a RNA sequence, a DNA sequence, or a combination thereof (a RNA-DNA combination sequence). Optionally, the guide polynucleotide can comprise at least one nucleotide, phosphodiester bond or linkage modification such as, but not limited, to Locked Nucleic Acid (LNA), 5-methyl dC, 2,6-Diaminopurine, 2′-Fluoro A, 2′-Fluoro U, 2′-O-Methyl RNA, phosphorothioate bond, linkage to a cholesterol molecule, linkage to a polyethylene glycol molecule, linkage to a spacer 18 (hexaethylene glycol chain) molecule, or 5′ to 3′ covalent linkage resulting in circularization. A guide polynucleotide that solely comprises ribonucleic acids is also referred to as a “guide RNA” or “gRNA” (US20150082478 published 19 Mar. 2015 and US20150059010 published 26 Feb. 2015). A guide polynucleotide may be engineered or synthetic.

[0640] The guide polynucleotide includes a chimeric non-naturally occurring guide RNA comprising regions that are not found together in nature (i.e., they are heterologous with each other). For example, a chimeric non-naturally occurring guide RNA comprising a first nucleotide sequence domain (referred to as Variable Targeting domain or VT domain) that can hybridize to a nucleotide sequence in a target DNA, linked to a second nucleotide sequence that can recognize the Cas endonuclease, such that the first and second nucleotide sequence are not found linked together in nature.

[0641] The guide polynucleotide can be a double molecule (also referred to as duplex guide polynucleotide) comprising a crNucleotide sequence (such as a crRNA) and a tracrNucleotide (such as a tracrRNA) sequence. In some cases, there is a linker polynucleotide that connects the crRNA and tracrRNA to form a single guide, for example an sgRNA.

### Gene Editing

[0642] The process for editing a genomic sequence combining DSB and modification templates generally comprises: introducing into a host cell a DSB-inducing agent, or a nucleic acid encoding a DSB-inducing agent, that recognizes a target sequence in the chromosomal sequence and is able to induce a DSB in the genomic sequence, and at least one polynucleotide modification template comprising at least one nucleotide alteration when compared to the nucleotide sequence to be edited. The polynucleotide modification template can further comprise nucleotide sequences flanking the at least one nucleotide alteration, in which the flanking sequences are substantially homologous to the chromosomal region flanking the DSB. Genome editing using DSB-inducing agents, such as Cas-gRNA complexes, has been described, for example in US20150082478 published on 19 Mar. 2015, WO2015026886 published on 26 Feb. 2015, WO2016007347 published 14 Jan. 2016, and WO/2016/025131 published on 18 Feb. 2016.

[0643] Some uses for guide RNA/Cas endonuclease systems have been described (see for example: US20150082478 A1 published 19 Mar. 2015, WO2015026886 published 26 Feb. 2015, and US20150059010 published 26 Feb. 2015) and include but are not limited to modifying or replacing nucleotide sequences of interest (such as a regulatory elements), insertion of polynucleotides of interest, gene knock-out, gene-knock in, modification of splicing sites and/or introducing alternate splicing sites, modifications of nucleotide sequences encoding a protein of interest, amino acid and/or protein fusions, and gene silencing by expressing an inverted repeat into a gene of interest.

[0644] Proteins may be altered in various ways including amino acid substitutions, deletions, truncations, and insertions. Methods for such manipulations are generally known. For example, amino acid sequence variants of the protein(s) can be prepared by mutations in the DNA. Methods for mutagenesis and nucleotide sequence alterations include, for example, Kunkel, (1985) Proc. Natl. Acad. Sci. USA 82:488-92; Kunkel et al., (1987) Meth Enzymol 154:367-82; U.S. Pat. No. 4,873,192; Walker and Gaastra, eds. (1983) Techniques in Molecular Biology (MacMillan Publishing Company, New York) and the references cited therein. Guidance regarding amino acid substitutions not likely to affect biological activity of the protein is found, for example, in the model of Dayhoff et al., (1978) Atlas of Protein Sequence and Structure (Natl Biomed Res Found, Washington, D.C.). Conservative substitutions, such as exchanging one amino acid with another having similar properties, may be preferable. Conservative deletions, insertions, and amino acid substitutions are not expected to produce radical changes in the characteristics of the protein, and the effect of any substitution, deletion, insertion, or combination thereof can be evaluated by routine screening assays. Assays for double-strand-break-inducing activity are known and generally measure the overall activity and specificity of the agent on DNA substrates comprising target sites.

[0645] Described herein are methods for genome editing with a Cas endonuclease and complexes with a Cas endonuclease and a guide polynucleotide. Following characterization of the guide RNA and PAM sequence, components of the endonuclease and associated CRISPR RNA (crRNA) may be utilized to modify chromosomal DNA in other organisms including plants. To facilitate optimal expression and nuclear localization (for eukaryotic cells), the genes comprising the complex may be optimized as described in WO2016186953 published 24 Nov. 2016, and then delivered into cells as DNA expression cassettes by methods known in the art. The components necessary to comprise an active complex may also be delivered as RNA with or without modifications that protect the RNA from degradation or as mRNA capped or uncapped (Zhang, Y. et al., 2016, Nat. Commun. 7:12617) or Cas protein guide polynucleotide complexes (WO2017070032 published 27 Apr. 2017), or any combination thereof. Additionally, a part or part(s) of the complex and crRNA may be expressed from a DNA construct while other components are delivered as RNA with or without modifications that protect the RNA from degradation or as mRNA capped or uncapped (Zhang et al. 2016 Nat. Commun. 7:12617) or Cas protein guide polynucleotide complexes (WO2017070032 published 27 Apr. 2017) or any combination thereof. To produce crRNAs in-vivo, tRNA derived elements may also be used to recruit endogenous RNAses to cleave crRNA transcripts into mature forms capable of guiding the complex to its DNA target site, as described, for example, in WO2017105991 published 22 Jun. 2017. Nickase complexes may be utilized separately or concertedly to generate a single or multiple DNA nicks on one or both DNA strands. Furthermore, the cleavage activity of the Cas endonuclease may be deactivated by altering key catalytic residues in its cleavage domain (Sinkunas, T. et al., 2013, EMBO J. 32:385-394) resulting in a RNA guided helicase that may be used to enhance homology directed repair, induce transcriptional activation, or remodel local DNA structures. Moreover, the activity of the Cas cleavage and helicase domains may both be knocked-out and used in combination with other DNA cutting, DNA nicking, DNA binding, transcriptional activation, transcriptional repression, DNA remodeling, DNA deamination, DNA unwinding, DNA recombination enhancing, DNA integration, DNA inversion, and DNA repair agents.

[0646] The transcriptional direction of the tracrRNA for the CRISPR-Cas system (if present) and other components of the CRISPR-Cas system (such as variable targeting domain, crRNA repeat, loop, anti-repeat) can be deduced as described in WO2016186946 published 24 Nov. 2016, and WO2016186953 published 24 Nov. 2016.

[0647] As described herein, once the appropriate guide RNA requirement is established, the PAM preferences for each new system disclosed herein may be examined. If the cleavage complex results in degradation of the randomized PAM library, the complex can be converted into a nickase by disabling the ATPase dependent helicase activity either through mutagenesis of critical residues or by assembling the reaction in the absence of ATP as described previously (Sinkunas, T. et al, 2013, EMBO J. 32:385-394). Two regions of PAM randomization separated by two protospacer targets may be utilized to generate a double-stranded DNA break which may be captured and sequenced to examine the PAM sequences that support cleavage by the respective complex.

[0648] In one embodiment, the invention describes a method for modifying a target site in the genome of a cell, the method comprising introducing into a cell at least one PGEN described herein, and identifying at least one cell that has a modification at said target, wherein the modification at said target site is selected from the group consisting of (i) a replacement of at least one nucleotide, (ii) a deletion of at least one nucleotide, (iii) an insertion of at least one nucleotide, the chemical alteration of at least one nucleotide, and (v) any combination of (i)-(iv).

[0649] The nucleotide to be edited can be located within or outside a target site recognized and cleaved by a Cas endonuclease. In one embodiment, the at least one nucleotide modification is not a modification at a target site recognized and cleaved by a Cas endonuclease. In another embodiment, there are at least 1, 2, 3, 4, 5, 6, 7, 8, 9, 10, 11, 12, 13, 14, 15, 16, 17, 18, 19, 20, 21, 22, 23, 24, 25, 26, 27, 30, 40, 50, 100, 200, 300, 400, 500, 600, 700, 900 or 1000 nucleotides between the at least one nucleotide to be edited and the genomic target site.

[0650] A knock-out may be produced by an indel (insertion or deletion of nucleotide bases in a target DNA sequence through NHEJ), or by specific removal of sequence that reduces or completely destroys the function of sequence at or near the targeting site.

[0651] A guide polynucleotide/Cas endonuclease induced targeted mutation can occur in a nucleotide sequence that is located within or outside a genomic target site that is recognized and cleaved by the Cas endonuclease.

[0652] The method for editing a nucleotide sequence in the genome of a cell can be a method without the use of an exogenous selectable marker by restoring function to a non-functional gene product.

[0653] In one embodiment, the invention describes a method for modifying a target site in the genome of a cell, the method comprising introducing into a cell at least one PGEN described herein and at least one donor DNA, wherein said donor DNA comprises a polynucleotide of interest, and optionally, further comprising identifying at least one cell that said polynucleotide of interest integrated in or near said target site.

[0654] In one aspect, the methods disclosed herein may employ homologous recombination (HR) to provide integration of the polynucleotide of interest at the target site.

[0655] Various methods and compositions can be employed to produce a cell or organism having a polynucleotide of interest inserted in a target site via activity of a CRISPR-Cas system component described herein. In one method described herein, a polynucleotide of interest is introduced into the organism cell via a donor DNA construct. As used herein, “donor DNA” is a DNA construct that comprises a polynucleotide of interest to be inserted into the target site of a Cas endonuclease. The donor DNA construct further comprises a first and a second region of homology that flank the polynucleotide of interest. The first and second regions of homology of the donor DNA share homology to a first and a second genomic region, respectively, present in or flanking the target site of the cell or organism genome.

[0656] The donor DNA can be tethered to the guide polynucleotide. Tethered donor DNAs can allow for co-localizing target and donor DNA, useful in genome editing, gene insertion, and targeted genome regulation, and can also be useful in targeting post-mitotic cells where function of endogenous HR machinery is expected to be highly diminished (Mali et al., 2013, Nature Methods Vol. 10:957-963).

[0657] One or more targeted edits can be introduced in the genome through CRISPR-Cas, or another targeted site-directed mutagenesis approach, by modifying the genomic locus or loci having a heterologous polynucleotide comprising a sequence at least 90% identical to a polynucleotide selected from the group consisting of: SEQ ID NOs: 1-287, or a heterologous polypeptide comprising a sequence at least 90% identical to a polypeptide selected from the group consisting of: SEQ ID NOs. 288-567.

Introduction of System Components into a Cell

[0658] The methods and compositions described herein do not depend on a particular method for introducing a sequence into an organism or cell, only that the polynucleotide or polypeptide gains access to the interior of at least one cell of the organism. Introducing includes reference to the incorporation of a nucleic acid into a eukaryotic or prokaryotic cell where the nucleic acid may be incorporated into the genome of the cell, and includes reference to the transient (direct) provision of a nucleic acid, protein or polynucleotide-protein complex (PGEN, RGEN) to the cell.

[0659] Methods for introducing polynucleotides or polypeptides or a polynucleotide-protein complex into cells or organisms are known in the art including, but not limited to, microinjection, electroporation, stable transformation methods, transient transformation methods, ballistic particle acceleration (particle bombardment), whiskers mediated transformation, bacterial-mediated transformation (e.g., Agrobacterium-mediated transformation Ochrobacter-mediated transformation, Rhizobiales-mediated transformation), direct gene transfer, viral-mediated introduction, transfection, transduction, cell-penetrating peptides, mesoporous silica nanoparticle (MSN)-mediated direct protein delivery, topical applications, sexual crossing, sexual breeding, and any combination thereof.

[0660] Delivery of a polynucleotide into plant cells can be achieved through particle mediated delivery, and any other direct method of delivery, such as but not limiting to, polyethylene glycol (PEG)-mediated transfection to protoplasts, whiskers mediated transformation, electroporation, particle bombardment, cell-penetrating peptides, or mesoporous silica nanoparticle (MSN)-mediated direct protein.

[0661] The polynucleotide or recombinant DNA construct can be provided to or introduced into a prokaryotic and eukaryotic cell or organism using a variety of transient transformation methods. Such transient transformation methods include, but are not limited to, the introduction of the polynucleotide construct directly into the plant.

[0662] Nucleic acids and proteins can be provided to a cell by any method including methods using molecules to facilitate the uptake of anyone or all components of a guided Cas system (protein and/or nucleic acids), such as cell-penetrating peptides and nanocarriers. See also US20110035836 published 10 Feb. 2011, and EP2821486A1 published 7 Jan. 2015.

[0663] Other methods of introducing polynucleotides into a prokaryotic and eukaryotic cell or organism or plant part can be used, including plastid transformation methods, and the methods for introducing polynucleotides into tissues from seedlings or mature seeds.

[0664] Stable transformation is intended to mean that the nucleotide construct introduced into an organism integrates into a genome of the organism and is capable of being inherited by the progeny thereof. Transient transformation is intended to mean that a polynucleotide is introduced into the organism and does not integrate into a genome of the organism or a polypeptide is introduced into an organism. Transient transformation indicates that the introduced composition is only temporarily expressed or present in the organism.

[0665] A variety of methods are available to identify those cells having an altered genome without using a screenable marker phenotype. Such methods can be viewed as directly analyzing a target sequence to detect any change in the target sequence, including but not limited to PCR methods, sequencing methods, nuclease digestion, Southern blots, and any combination thereof.

### Yield and Agronomic Traits

### Drought

[0666] In some cases, a plant resulting from seeds or other plant elements transformed with a transgene can exhibit a physiological change, such as a compensation of the stress-induced reduction in photosynthetic activity. Fv/Fm tests whether or not plant stress affects photosystem II in a dark adapted state. Fv/Fm is one of the most commonly used chlorophyll fluorescence measuring parameter. The Fv/Fm test is designed to allow the maximum amount of the light energy to take the fluorescence pathway. It compares the dark-adapted leaf pre-photosynthetic fluorescent state, called minimum fluorescence, or Fo, to maximum fluorescence called Fm. In maximum fluorescence, the maximum number of reaction centers have been reduced or closed by a saturating light source. In general, the greater the plant stress, the fewer open reaction centers available, and the Fv/Fm ratio is lowered. Fv/Fm is a measuring protocol that works for many types of plant stress. For example, there would be a difference in the Fv/Fm after exposure of a transgene treated plant that had been subjected to heat shock or drought conditions, as compared to a corresponding control, a genetically identical plant that does not contain the transgenes grown in the same conditions. In some cases, the transgene-associated plant as disclosed herein can exhibit an increased change in photosynthetic activity AFv(AFv/Fm) after heat-shock or drought stress treatment, for example 1, 2, 3, 4, 5, 6, 7 days or more after the heat-shock or drought stress treatment, or until photosynthesis ceases, as compared with corresponding control plant of similar developmental stage but not comprising the transgene. For example, a plant having a transgene able to confer heat and/or drought-tolerance can exhibit a AFv/Fm of from about 0.1 to about 0.8 after exposure to heat-shock or drought stress or a AFv/Fm range of from about 0.03 to about 0.8 under one day, or 1, 2, 3, 4, 5, 6, 7, or over 7 days post heat-shock or drought stress treatment, or until photosynthesis ceases. In some embodiments, stress-induced reductions in photosynthetic activity can be compensated by at least about 0.25% (for example, at least about 0.5%>, between 0.5%> and 1%>, at least about 1%), between 1%> and 2%, at least about 2%, between 2% and 3%, at least about 3%, between 3% and 5%, at least about 5%, between 5% and 10%, at least about 8%, at least about 10%), between 10% and 15%, at least about 15%, between 15% and 20%, at least about 20%, between 20$ and 25%, at least about 25%, between 25% and 30%, at least about 30%, between 30% and 40%, at least about 40%, between 40% and 50%, at least about 50%, between 50% and 60%, at least about 60%, between 60% and 75%, at least about 75%, between 75% and 80%, at least about 80%, between 80% and 85%, at least about 85%, between 85% and 90%, at least about 90%, between 90% and 95%, at least about 95%, between 95% and 99%, at least about 99% or at least 100%) as compared to the photosynthetic activity decrease in a corresponding reference agricultural plant following heat shock conditions. Significance of the difference between transgene-associated and reference agricultural plants can be established upon demonstrating statistical significance, for example at p<0.05 with an appropriate parametric or non-parametric statistic, e.g., Chi-square test, Student's t-test, Mann-Whitney test, or F-test based on the assumption or known facts that the transgene-associated plant and reference agricultural plant have identical or near identical genomes (isoline comparison).

[0667] Increased heat and/or drought tolerance can be assessed with physiological parameters including, but not limited to, increased height, overall biomass, root and/or shoot biomass, seed germination, seedling survival, photosynthetic efficiency, transpiration rate, seed/fruit number or mass, plant grain or fruit yield, leaf chlorophyll content, photosynthetic rate, root length, wilt recovery, turgor pressure, or any combination thereof, as compared to a reference agricultural plant grown under similar conditions.

### Nutrient Limitation

[0668] Transgenes described herein may also confer to the plant an increased ability to grow in nutrient limiting conditions, for example by solubilizing or otherwise making available to the plants macronutrients or micronutrients that are complexed, insoluble, or otherwise in an unavailable form. Crop plant nutrients include, without limitation, nitrogen, phosphorous, and potassium.

[0669] In one embodiment, a plant is transformed with a transgene that confers increased ability to liberate and/or otherwise provide to the plant with nutrients selected from the group consisting of phosphate, nitrogen, potassium, iron, manganese, calcium, molybdenum, vitamins, or other micronutrients. Such a plant can exhibit increased growth in soil comprising limiting amounts of such nutrients when compared with reference agricultural plant. Differences between the transgene-associated plant and reference agricultural plant can be measured by comparing the biomass of the two plant types grown under limiting conditions, or by measuring the physical parameters described above. Therefore, in one embodiment, the plant comprising a transgene shows increased tolerance to nutrient limiting conditions as compared to a reference agricultural plant grown under the same nutrient limited concentration in the soil, as measured for example by increased biomass or seed yield of at least 10%, between 10% and 15%, for example at least 15%, between 15% and 20%, at least 20%, between 20% and 30%, at least 30%, between 30% and 40%, at least 40%, between 40% and 50%, at least 50%, between 50% and 60%, at least 60%, between 60% and 75%, at least 75%, between 75% and 100%, at least 100%, between 100% and 150%, at least 150%, between 150% and 200%, at least 200%), between 200% and 300%, at least 300% or more, when compared with isoline plants grown under the same conditions.

[0670] In another embodiment, the plant containing the transgene is able to grown under nutrient stress conditions while exhibiting no difference in the physiological parameter compared to a plant that is grown without nutrient stress. In some embodiments, such a plant will exhibit no difference in the physiological parameter when grown with 2-5% less nitrogen than average cultivation practices on normal agricultural land, for example, at least 5-10% less nitrogen, at least 10-15% less nitrogen, at least 15-20% less nitrogen, at least 20-25% less nitrogen, at least 25-30% less nitrogen, at least 30-35% less nitrogen, at least 35-40% less nitrogen, at least 40-45% less nitrogen, at least 45-50% less nitrogen, at least 50-55% less nitrogen, at least 55-60% less nitrogen, at least 60-65% less nitrogen, at least 65-70% less nitrogen, at least 10-15% less nitrogen, at least 80-85% less nitrogen, at least 85-90% less nitrogen, at least 90-95% less nitrogen, or less, when compared with crop plants grown under normal conditions during an average growing season.

### Water Use Efficiency

[0671] The host plants transformed with the transgene may also show improvements in their ability to utilize water more efficiently. Water use efficiency is a parameter often correlated with drought tolerance. Water use efficiency (WUE) is a parameter often correlated with drought tolerance, and is the CO2 assimilation rate per amount of water transpired by the plant. An increase in biomass at low water availability may be due to relatively improved efficiency of growth or reduced water consumption. In selecting traits for improving crops, a decrease in water use, without a change in growth would have particular merit in an irrigated agricultural system where the water input costs were high. An increase in growth without a corresponding jump in water use would have applicability to all agricultural systems. In many agricultural systems where water supply is not limiting, an increase in growth, even if it came at the expense of an increase in water use also increases yield.

[0672] When soil water is depleted or if water is not available during periods of drought, crop yields are restricted. Plant water deficit develops if transpiration from leaves exceeds the supply of water from the roots. The available water supply is related to the amount of water held in the soil and the ability of the plant to reach that water with its root system. Transpiration of water from leaves is linked to the fixation of carbon dioxide by photosynthesis through the stomata. The two processes are positively correlated so that high carbon dioxide influx through photosynthesis is closely linked to water loss by transpiration. As water transpires from the leaf, leaf water potential is reduced and the stomata tend to close in a hydraulic process limiting the amount of photosynthesis. Since crop yield is dependent on the fixation of carbon dioxide in photosynthesis, water uptake and transpiration are contributing factors to crop yield. Plants which are able to use less water to fix the same amount of carbon dioxide or which are able to function normally at a low water potential, are more efficient and thereby are able to produce more biomass and economic yield in many agricultural systems. An increased water use efficiency of the plant relates in some cases to an increased fruit/kernel size or number.

[0673] Therefore, in one embodiment, the plants described herein exhibit an increased water use efficiency (WUE) when compared with a reference agricultural plant grown under the same conditions. For example, the transgene may provide an increase in WUE to a plant that is of at least 3%, between 3% and 5%, at least 5%, between 5% and 10%, least 10%, between 10% and 15%, for example at least 15%, between 15% and 20%, at least 20%, between 20% and 30%, at least 30%, between 30% and 40%, at least 40%, between 40% and 50%, at least 50%, between 50% and 60%, at least 60%, between 60% and 75%, at least 75%, between 75% and 100%, at least 100%, between 100% and 150%, at least 150%, between 150% and 200%, at least 200%, between 200% and 300%, at least 300% or more, when compared with uninoculated plants grown under the same conditions. Such an increase in WUE can occur under conditions without water deficit, or under conditions of water deficit, for example, when the soil water content is less than or equal to 60% of water saturated soil, for example, less than or equal to 50%, less than or equal to 40%, less than or equal to 30%, less than or equal to 20%, less than or equal to 10% of water saturated soil on a weight basis. In some embodiments, the plants inoculated with the endophytic population show increased yield under non-irrigated conditions, as compared to reference agricultural plants grown under the same conditions.

[0674] In a related embodiment, the plant comprising the transgene can have a higher relative water content (RWC), than a reference agricultural plant grown under the same conditions.

### Plant Breeding

[0675] In certain embodiments of the disclosure, a fertile plant is a plant that produces viable male and female gametes and is self-fertile. Such a self-fertile plant can produce a progeny plant without the contribution from any other plant of a gamete and the genetic material comprised therein. Other embodiments of the disclosure can involve the use of a plant that is not self-fertile because the plant does not produce male gametes, or female gametes, or both, that are viable or otherwise capable of fertilization.

[0676] The present disclosure finds use in the breeding of plants comprising one or more introduced traits, or edited genomes.

[0677] A non-limiting example of how two traits can be stacked into the genome at a genetic distance of, for example, 5 cM from each other is described as follows: A first plant comprising a first transgenic target site integrated into a first DSB target site within the genomic window and not having the first genomic locus of interest is crossed to a second transgenic plant, comprising a genomic locus of interest at a different genomic insertion site within the genomic window and the second plant does not comprise the first transgenic target site. About 5% of the plant progeny from this cross will have both the first transgenic target site integrated into a first DSB target site and the first genomic locus of interest integrated at different genomic insertion sites within the genomic window. Progeny plants having both sites in the defined genomic window can be further crossed with a third transgenic plant comprising a second transgenic target site integrated into a second DSB target site and/or a second genomic locus of interest within the defined genomic window and lacking the first transgenic target site and the first genomic locus of interest. Progeny are then selected having the first transgenic target site, the first genomic locus of interest and the second genomic locus of interest integrated at different genomic insertion sites within the genomic window. Such methods can be used to produce a transgenic plant comprising a complex trait locus having at least 1, 2, 3, 4, 5, 6, 7, 8, 9, 10, 11, 12, 13, 14, 15, 16, 17, 19, 19, 20, 21, 22, 23, 24, 25, 26, 27, 28, 29, 30, 31 or more transgenic target sites integrated into DSB target sites and/or genomic loci of interest integrated at different sites within the genomic window. In such a manner, various complex trait loci can be generated.

[0678] While the invention has been particularly shown and described with reference to a preferred embodiment and various alternate embodiments, it will be understood by persons skilled in the relevant art that various changes in form and details can be made therein without departing from the spirit and scope of the invention. For instance, while the particular examples below may illustrate the methods and embodiments described herein using a specific plant, the principles in these examples may be applied to any plant. Therefore, it will be appreciated that the scope of this invention is encompassed by the embodiments of the inventions recited herein and in the specification rather than the specific examples that are exemplified below. All cited patents and publications referred to in this application are herein incorporated by reference in their entirety, for all purposes, to the same extent as if each were individually and specifically incorporated by reference.

### EXAMPLES

[0679] The following are examples of specific embodiments of some aspects of the invention. The examples are offered for illustrative purposes only, and are not intended to limit the scope of the invention in any way. Efforts have been made to ensure accuracy with respect to numbers used (e.g., amounts, temperatures, etc.), but some experimental error and deviation should, of course, be allowed for.

[0680] The following publications are key representatives of the methods involved (Habben et al. 2014; Shi et al. 2017; Wu et al. 2019). Other methods for gene candidate pre-screening and selections, greenhouse testing, managed stress field testing, and other methods, are known in the art.

[0681] Rapid advances in transposon tagging, activation tagging, positional cloning, gene and genomic sequencing, burgeoning published literature, model crop species, and the development of managed stress environments, greatly expanded the concepts to test. Together with improved transformation technology, well-characterized promoters and other genetic elements, and efficient vector construction, transgenic maize plants were produced regularly, at reasonable cost, in quantity and diversity enough to form a pipeline for field testing. Genes identified for testing were sourced, for example, from bioinformatics analyses of crop genomes, from new lead discovery, optimization of existing leads, and redesigned gene edits.

### Example 1: Identification of Gene Leads

[0682] Attributes of the ideal lead were classified into roughly right biology, right genetics, and right path. Right biology was a large effect size, few to no serious negative secondary traits, and distinctiveness from existing breeding germplasm. Right genetics was dominance, penetrance, stable expressivity, and sometimes event chromosomal location favorable for trait germplasm integration. Right path was simplicity (esp. single gene), technical feasibility, freedom to operate, expected regulatory approval, and frequently also cis-genic (e.g. genes from maize in maize).

[0683] Identification and testing of potential gene leads comprised multiple activities: sourcing gene candidates and hypotheses, primary discovery field tests, retesting to validate leads, and then lead expansions, optimizations, and characterization. Primary tests and lead expansions involved the first instances a specific unique gene was field tested, usually with one promoter. Primary testing included both the first year and second year retest confirmation of that gene. Lead expansions, as an extended special category of newly tested genes, involved testing other new genes related to the founding primary test lead, such as gene family members or pathway-network related genes. Optimizations involved testing the same gene as the original lead, but usually in varied DNA cassette configurations and in other germplasm. In practice these three areas of activities overlapped, results of each informing the others. For instance, newly established leads could have been in continued field testing while molecular and physiology mode of action studies, homolog and pathway lead expansions, and construct optimizations were initiated. The annual construct testing profile of primary tests, lead expansions and optimizations showed primary testing (66.8% all constructs), lead expansions (5.5%), and optimizations (27.6%).

[0684] Genes selected for testing were placed into constructs for transformation into maize cells, via a method known in the art.

[0685] There were approximately 3863 total field tests on approximately 3331 constructs (via 5-10 transformed events per construct), with about 10% of constructs tested more than once, usually as retests in adjacent years. The 3331 unique field-tested constructs here exclude 9.3% of field tested constructs that were: (a) vector backbone or promoter controls; (b) deviations from expected construct designs, such as incomplete ORFs; (c) uncertain gene sources; (d) involving third party confidential technology, and (e) flowering-maturity or stature related. Unique vectors (3331) exceeded 2:1 unique genes (1671) because some genes were used in multiple vectors, and multi-gene molecular stacks typically involved genes already present in previous vectors.

### Example 2: Particle Bombardment Transformation of Corn Plants

[0686] In this example, transformation of immature maize embryos via particle bombardment is described. It is understood that a similar protocol may be used for the transformation of other plants, such as (but not limited to): soybean, cotton, canola, wheat, rice, sorghum, or sunflower.

[0687] Prior to bombardment, 10-12 DAP immature embryos are isolated from ears of a corn plant and placed on culture medium plus 16% sucrose for three hours to plasmolyze the scutellar cells.

[0688] Single plasmids or multiple plasmids may be used for each particle bombardment. In one example, a plurality of plasmids include: 1) a plasmid comprising a donor cassette, 2) a plasmid comprising an expression cassette for the double-strand-break-inducing agent, and 3) a plasmid comprising an expression cassette for the morphogenic factor.

[0689] To attach the DNA to 0.6 μm gold particles, the plasmids are mixed by adding 10 μl of each plasmid together in a low-binding microfuge tube (Sorenson Bioscience 39640T). To this suspension, 50 μl of 0.6 μm gold particles (30 μg/μl) and 1.0 μl of Transit 20/20 (Cat No MIR5404, Minis Bio LLC) are added, and the suspension is placed on a rotary shaker for 10 minutes. The suspension is centrifuged at 10,000 RPM (˜9400×g) and the supernatant is discarded. The gold particles are re-suspended in 120 μl of 100% ethanol, briefly sonicated at low power and 10 μl is pipetted onto each carrier disc. The carrier discs are then air-dried to remove all the remaining ethanol. Particle bombardment is performed using a Biolistics PDF-1000, at 28 inches of Mercury using a 425 PSI rupture disc.

[0690] After particle bombardment, the immature embryos are selected on 506J medium modified to contain 12.5 g/l mannose and 5 g/l maltose and no sucrose. After 10-12 weeks on selection, plantlets are regenerated and analyzed using qPCR.

[0691] Components may be delivered as DNA, RNA, protein, or any combination of the preceding. In one example, Cas9 and the guide RNA were delivered as a ribonucleoprotein (RNP) complex. Previously, we have described a method for Cas9-gRNA delivery in the form of ribonucleoproteins (RNPs) using gold microparticles. We also described a method for activation of broken pre-integrated selectable marker gene through non-homologous end joining (NHEJ) mechanism upon Cas9-gRNA delivery as DNA vectors or RNP complex (WO 2017/070029 A1).

### Example 3: Agrobacterium-Mediated Transformation of Corn Plants

[0692] In this example, transformation of immature maize embryos via Agrobacterium mediation is described. It is understood that a similar protocol may be used for the transformation of other plants, such as (but not limited to): soybean, cotton, canola, wheat, rice, sorghum, or sunflower.

### Preparation of Agrobacterium Master Plate.

[0693] Agrobacterium tumefaciens harboring a binary donor vector is streaked out from a −80° C. frozen aliquot onto solid 12V medium and cultured at 28° C. in the dark for 2-3 days to make a master plate.

### Growing Agrobacterium on Solid Medium.

[0694] A single colony or multiple colonies of Agrobacterium are picked from the master plate and streaked onto a second plate containing 8101 medium and incubated at 28° C. in the dark overnight.

[0695] Agrobacterium infection medium (700 medium A; 5 ml) is added to a 14 mL conical tube in a hood. About 3 full loops of Agrobacterium from the second plate are suspended in the tube and the tube was then vortexed to make an even suspension. One mL is transferred to a spectrophotometer tube and the optical density (550 nm) of the suspension is adjusted to a reading of about 0.35-1.0. The Agrobacterium concentration is approximately 0.5 to 2.0×10⁹ cfu/mL. The final Agrobacterium suspension is aliquoted into 2 mL microcentrifuge tubes, each containing about 1 mL of the suspension. The suspensions are then used as soon as possible.

### Growing Agrobacterium on Liquid Medium.

[0696] Alternatively, Agrobacterium can be prepared for transformation by growing in liquid medium. One day before infection, a 125 ml flask is prepared with 30 ml of 557A medium (10.5 g/l potassium phosphate dibasic, 4.5 g/l potassium phosphate monobasic anhydrous, 1 g/l ammonium sulfate, 0.5 g/l sodium citrate dehydrate, 10 g/l sucrose, 1 mM magnesium sulfate) and 30 μL spectinomycin (50 mg/mL). A half loopful of Agrobacterium from a second plate is suspended into the flasks and placed on an orbital shaker set at 200 rpm and incubated at the 28° C. overnight. The Agrobacterium culture is centrifuged at 5000 rpm for 10 min. The supernatant is removed and the Agrobacterium infection medium was added. The bacteria are resuspended by vortex and the optical density (550 nm) of Agrobacterium suspension is adjusted to a reading of about 0.35 to 2.0.

### Maize Transformation

[0697] Ears of a maize (Zea mays L.) cultivar are surface-sterilized for 15-20 min in 20% (v/v) bleach (5.25% sodium hypochlorite) plus 1 drop of Tween 20 followed by 3 washes in sterile water. Immature embryos (IEs) are isolated from ears and are placed in 2 ml of the Agrobacterium infection medium. The optimal size of the embryos varies based on the inbred, but for transformation with WUS2 and ODP2 a wide size range of immature embryo sizes could be used. The solution is drawn off and 1 ml of Agrobacterium suspension was added to the embryos and the tube vortexed for 5-10 sec. The microfuge tube is allowed to stand for 5 min in the hood. The suspension of Agrobacterium and embryos are poured onto 7101 (or 562V) co-cultivation medium (see Table 2). Any embryos left in the tube are transferred to the plate using a sterile spatula. The Agrobacterium suspension is drawn off and the embryos placed axis side down on the media. The plate is sealed with Parafilm M® film (moisture resistant flexible plastic, available at Bemis Company, Inc., 1 Neenah Center 4^{th} floor, PO Box 669, Neenah, Wis. 54957) and incubated in the dark at 21° C. for 1-3 days of co-cultivation.

[0698] Embryos are transferred to resting medium (605T medium) without selection. Three to 7 days later, they are transferred to maturation medium (289Q medium) supplemented with a selective agent

### Example 4: Morphogenic Factors Improve Transformation Frequency

[0699] Morphogenic factor genes (also referred to as “developmental genes”, for example but not limited to: ODP2 and WUS) are desired components of the transformation process: their delivery into plant cells facilitates cell division and significantly increases transformation frequencies. Moreover, these genes allow successful transformation of many elite genotypes, which transformation, otherwise, cannot be effectively accomplished.

[0700] Parameters of the transformation protocol can be modified to ensure that the BBM activity is transient. One such method involves precipitating the BBM-containing plasmid in a manner that allows for transcription and expression, but precludes subsequent release of the DNA, for example, by using the chemical PEI.

[0701] In one example, the BBM plasmid is precipitated onto gold particles with PEI, while the transgenic expression cassette (UBI::moPAT˜GFPm::PinII; moPAT is the maize optimized PAT gene) to be integrated is precipitated onto gold particles using the standard calcium chloride method.

[0702] Briefly, gold particles were coated with PEI as follows. First, the gold particles were washed. Thirty-five mg of gold particles, 1.0 in average diameter (A.S.I. #162-0010), were weighed out in a microcentrifuge tube, and 1.2 ml absolute EtOH was added and vortexed for one minute. The tube was incubated for 15 minutes at room temperature and then centrifuged at high speed using a microfuge for 15 minutes at 4° C. The supernatant was discarded and a fresh 1.2 ml aliquot of ethanol (EtOH) was added, vortexed for one minute, centrifuged for one minute, and the supernatant again discarded (this is repeated twice). A fresh 1.2 ml aliquot of EtOH was added, and this suspension (gold particles in EtOH) was stored at −20° C. for weeks. To coat particles with polyethylamine (PEI; Sigma #P3143), 250 μl of the washed gold particle/EtOH mix was centrifuged and the EtOH discarded. The particles were washed once in 100 μl ddH2O to remove residual ethanol, 250 μl of 0.25 mM PEI was added, followed by a pulse-sonication to suspend the particles and then the tube was plunged into a dry ice/EtOH bath to flash-freeze the suspension, which was then lyophilized overnight. At this point, dry, coated particles could be stored at −80° C. for at least 3 weeks. Before use, the particles were rinsed 3 times with 250 μl aliquots of 2.5 mM HEPES buffer, pH 7.1, with 1× pulse-sonication, and then a quick vortex before each centrifugation. The particles were then suspended in a final volume of 250 μl HEPES buffer. A 25 μl aliquot of the particles was added to fresh tubes before attaching DNA. To attach uncoated DNA, the particles were pulse-sonicated, then 1 μg of DNA (in 5 μl water) was added, followed by mixing by pipetting up and down a few times with a Pipetteman and incubated for 10 minutes. The particles were spun briefly (i.e. 10 seconds), the supernatant removed, and 60 μl EtOH added. The particles with PEI-precipitated DNA-1 were washed twice in 60 μl of EtOH. The particles were centrifuged, the supernatant discarded, and the particles were resuspended in 45 μl water. To attach the second DNA (DNA-2), precipitation using a water-soluble cationic lipid transfection reagent was used. The 45 μl of particles/DNA-1 suspension was briefly sonicated, and then 5 μl of 100 ng/μl of DNA-2 and 2.5 μl of the water-soluble cationic lipid transfection reagent were added. The solution was placed on a rotary shaker for 10 minutes, centrifuged at 10,000 g for 1 minute. The supernatant was removed, and the particles resuspended in 60 μl of EtOH. The solution was spotted onto macrocarriers and the gold particles onto which DNA-1 and DNA-2 had been sequentially attached were delivered into scutellar cells of 10 DAP Hi-II immature embryos using a standard protocol for the PDS-1000. For this experiment, the DNA-1 plasmid contained a UBI::RFP::pinII expression cassette, and DNA-2 contained a UBI::CFP::pinII expression cassette. Two days after bombardment, transient expression of both the CFP and RFP fluorescent markers was observed as numerous red & blue cells on the surface of the immature embryo. The embryos were then placed on non-selective culture medium and allowed to grow for 3 weeks before scoring for stable colonies. After this 3-week period, 10 multicellular, stably-expressing blue colonies were observed, in comparison to only one red colony. This demonstrated that PEI-precipitation could be used to effectively introduce DNA for transient expression while dramatically reducing integration of the PEI-introduced DNA and thus reducing the recovery of RFP-expressing transgenic events. In this manner, PEI-precipitation can be used to deliver transient expression of BBM and/or WUS2.

[0703] For example, the particles are first coated with UBI::BBM::pinII using PEI, then coated with UBI::moPAT˜YFP using a water-soluble cationic lipid transfection reagent, and then bombarded into scutellar cells on the surface of immature embryos. PEI-mediated precipitation results in a high frequency of transiently expressing cells on the surface of the immature embryo and extremely low frequencies of recovery of stable transformants Thus, it is expected that the PEI-precipitated BBM cassette expresses transiently and stimulates a burst of embryogenic growth on the bombarded surface of the tissue (i.e. the scutellar surface), but this plasmid will not integrate. The PAT˜GFP plasmid released from the Ca++/gold particles is expected to integrate and express the selectable marker at a frequency that results in substantially improved recovery of transgenic events. As a control treatment, PEI-precipitated particles containing a UBI::GUS::pinII (instead of BBM) are mixed with the PAT˜GFP/Ca++ particles. Immature embryos from both treatments are moved onto culture medium containing 3 mg/l bialaphos. After 6-8 weeks, it is expected that GFP+, bialaphos-resistant calli will be observed in the PEI/BBM treatment at a much higher frequency relative to the control treatment (PEI/GUS).

[0704] As an alternative method, the BBM plasmid is precipitated onto gold particles with PEI, and then introduced into scutellar cells on the surface of immature embryos, and subsequent transient expression of the BBM gene elicits a rapid proliferation of embryogenic growth. During this period of induced growth, the explants are treated with Agrobacterium using standard methods for maize (see Example 1), with T-DNA delivery into the cell introducing a transgenic expression cassette such as UBI::moPAT˜GFPm::pinII. After co-cultivation, explants are allowed to recover on normal culture medium, and then are moved onto culture medium containing 3 mg/l bialaphos. After 6-8 weeks, it is expected that GFP+, bialaphos-resistant calli will be observed in the PEI/BBM treatment at a much higher frequency relative to the control treatment (PEI/GUS).

[0705] It may be desirable to “kick start” callus growth by transiently expressing the BBM and/or WUS2 polynucleotide products. This can be done by delivering BBM and WUS2 5′-capped polyadenylated RNA, expression cassettes containing BBM and WUS2 DNA, or BBM and/or WUS2 proteins. All of these molecules can be delivered using a biolistics particle gun. For example 5′-capped polyadenylated BBM and/or WUS2 RNA can easily be made in vitro using Ambion's mMessage mMachine kit. RNA is co-delivered along with DNA containing a polynucleotide of interest and a marker used for selection/screening such as Ubi::moPAT˜GFPm::PinII. It is expected that the cells receiving the RNA will immediately begin dividing more rapidly and a large portion of these will have integrated the agronomic gene. These events can further be validated as being transgenic clonal colonies because they will also express the PAT˜GFP fusion protein (and thus will display green fluorescence under appropriate illumination). Plants regenerated from these embryos can then be screened for the presence of the polynucleotide of interest.

[0706] Use of morphogenic factors, e.g., BBM and/or WUS, had several advantages in our experiments. First, some genotypes are recalcitrant to some types of transformation. Second, forcing cells into division increases the chances of successful outcome, as it activates DSB repair mechanisms. Third, chromosomes positioning in the nucleus is not random but occupy specific territories specific to both cell type and tissue type. Moreover, chromatin organization and interaction are different and depend on specific cell cycle stages. For example, G1 stage is transcriptionally active and characterized by a short range intrachromosomal contact compare to long-range contacts. By association of Hi-C data with cell cycle progression, the prevalence of local contacts during interphase and the enrichment of long-range mitotic contacts during mitosis and early G1 stages was affirmed. Therefore, expression of morphogenic genes, which pushes cell to replication (S-phase) and to cell division likely increases chances of “improper” DSB repair and generation of the desired chromosomal rearrangements.

[0707] Other cell cycle proteins and transcription factors may also contribute to the successful outcome.

### Example 5: Gene Expression Strategies

[0708] Gene expression strategy is an integral component of gene testing hypotheses. The desired expression pattern was however guided by the gene discovery source, such as activation tagging or specific literature reports. Most primary test gene concepts involved a single gene overexpression (88.2%), of these often using the well-known ubiquitin promoter UB1ZM PRO (65.4%), or moderate OE promoters such as ZM-GOS2 PRO (4.3%), or OS-ACTIN PRO (0.6%). These moderate constitutive promoters were often deliberately used with regulatory genes, especially transcription factors, to mitigate perceived risk of negative effects sometimes observed by excessive expression. The remaining single gene OE primary tests were spread across dozens of promoters or variants. Some single gene primary test concepts (2.5%) required more targeted tissue-preferred or developmental-temporal expression patterns, usually involving root, vegetative-leaf, stalk or flowering preferences, drought or nitrogen inducibility, or diurnal temporal patterns. Such targeted expression was however more commonly employed for lead optimizations. In 11.8% of primary tests the goal was rather to reduce or eliminate expression. The most common approach was to drive RNAi, using the UB1ZM PRO (71%) or other constitutive promoters, although a few were targeted promoters. Gene editing enabled many gene-reducing strategies, such as whole gene knockouts, frameshifts, and promoter deletions.

[0709] Multi-gene constructs stacks were 8.7% of all tests, which used different promoters in the stack to avoid vector or transformant instability, and sometimes mixed expression strategies. Genetics stacks were 2.4%, usually containing multiple validated leads. Gene editing was 0.4%, using native or emplaced promoters. Most constructs were greenhouse sampled before field testing for qRT-PCR analysis to verify transgene expression, but for most RNAi experiments, the endogenous gene expression reduction was quantified afterwards for only the positive field-performing constructs.

[0710] An estimated 1671 unique genes were field tested. The total number with same gene variants increases approximately 10% when considering alleles, altered peptides, genomic regions, truncations, fusions, and RNAi sub-fragments. Most genes involved complete CDS ORFs, many being codon-optimized for maize expression (designated by “MO”). A total of 47 species contributed genes. Plant genes comprised 97.2%, with 59.5% monocot and 37.5% dicot. Bacteria comprised 1.5% and fungi 1.2%. Of plant genes, maize genes were 53.0%, with the next top three species being Arabidopsis (36.6%), rice (6.1%) and sorghum (1.8%). About 860 maize genes were tested, representing just 2.2% of the maize genome at 40K gene estimate. Similarly, the 595 Arabidopsis genes tested are about 2.2% of that 27K gene genome.

### Example 5: Model Systems

[0711] The chief model systems were forward genetic transgene activation-tagging in Arabidopsis and Rice, and reverse genetics transgenic (usually overexpression) screening in short-cycling maize, Arabidopsis, and rice. Bacterial reverse-genetics screens were used for specific concept areas thought translatable to plants, such as reactive oxygen species tolerance. Reverse genetics approaches ranged from those involving strong specific hypotheses to less-specific hypotheses and thus more ‘open’ screens, especially when involving RNA profiling, pathway-network affiliations, or homologs and family member information.

### Example 6: Field Testing

[0712] All field tests measured yield under a range of environmental conditions across field locations, with water availability often being the chief abiotic stress factor affecting yield, whether due to limited ambient rainfall or purposeful managed drought stress.

[0713] Hypothesis concepts represented by these constructs were nominated to field testing in these main target trait categories: DRT or yield under drought or simply abiotic stress (57%); NUE or Nitrogen Use Efficiency (34.7%); YE or Yield Enhancement, including yield stability and dual DRT-NUE testing (7.4%); maturity or flowering (0.4%); plant stature (0.2%); and others, mostly various abiotic stresses such as temperature (0.5%).

[0714] Most first time field tests were assembled into annual cohort subsets sharing a single transformation inbred line, a single top-cross tester, and a common nursery source. It was commonly observed that significantly positive performing constructs are outnumbered by significantly negative performing constructs, although in this example the split between all nominally positive or negative performance is roughly even. The magnitude of negative performance is typically greater than the magnitude of positive performance, something also commonly seen.

[0715] Constructs meeting performance criteria in more than one location were generally retested to validate in the following year, especially if they did not show negative impacts on secondary traits such as standability, maturity, plant height, or grain moisture. Across all years about 10% of constructs were retested. Events selection for retesting was affected by many other factors including: concept redundancy with other test constructs, field testing space and budget constraints, nursery seed availability, permits and timing, retirement of current vector backbones or transformation germplasm, and perceived regulatory burdens.

[0716] Because second year testing was more rigorous, it was usually observed that exceptionally high performing first-year events moderated performance in second year tests, often to below sustaining interest. In contrast, marginally performing first year events rarely to never improved performance. The most enduring prospective leads performed moderately high (e.g., 4-5 bu/ac or more) at multiple locations in the first-year tests and repeated similarly in second or subsequent year tests.

### Example 7: Validated Leads

[0717] After two years of positive field test performance, a gene construct test was generally deemed ‘validated’, which meant it was considered worthy of investing further field testing, physiological and mode-of-action characterization, and lead optimization. Historically 1.3% (22/1671) of all genes became validated. Because the BLUP p-value was 0.1 in both the first and second year of testing, the validated leads rate tracks right on the cusp of statistical significance (when roughly calculated as 0.1×0.1=0.01). However, as noted above in practice advancement decisions were more complex than this. Once validated, continued testing in additional years pared down the number of actively pursued validated leads. Lead discontinuation was driven by this additional field testing, with particular added scrutiny for germplasm interactions, secondary traits, and effect size relative to commercial potential, ability or not to be sufficiently performance optimized, and expected deregulation costs. The pipeline uncovered other genes with confirmed biological effects. The overall gene validation rate was 1.3% for primary and lead expansion concepts.

[0718] Whether YE, NUE, or DRT, these are all clearly complex interconnected traits, with myriad subtending connections, and the measurement was always yield. Positive yield determinations were selected as: 5-10% increase in yield at normal water-nitrogen management; maintained yield at 30% less nitrogen; and 10% yield increase under moderate-severe (drought) stress. The trait categories YE had a 4% success rate, DRT 1.6% and NUE 0.7%. Many genes that performed under drought were dropped, so the drought or abiotic stress validation rate is well below the success rate for demonstrating some drought tolerance. Validated drought leads generally contain those that best preserved yield parity under normal water environments, a key criterion for successful drought leads. Plant hormones have long been implicated in governing complex plant biology, and many validated leads are hormone related.

### Example 8: Lead Expansion

[0719] Lead expansions were efforts to increase gene testing space around specific validated gene leads. Lead expansions involve new untested genes and were really a specialized subset of primary testing. Lead expansion followed several main strategies. Lead expansion commonly involved testing other gene family members from the same species (usually maize, and sometimes allelic variants), or from other organisms, especially closely related plants. There was a balanced strategy to include greater sequence diversity, but not so distant that function likely differed entirely, although where this boundary lay itself became a discovery exercise. Gene expression analysis was also used to priority rank gene family members. Lead expansion often employed gene expression analyses of the original lead-bearing transgenic plants, to seek additional pathway-network genes that may be specifically and directly regulated by the lead OE, possibly enriching for other genes that drive or convey the desired positive effects of the original lead.

### Example 9: Lead Optimization

[0720] Lead optimizations aimed to develop validated leads, by increasing their product level performance, mitigating any negative phenotypes, and learning more about the lead's functional stability, germplasm and biotech trait combinability, and capabilities and ideal product placement. Optimization efforts frequently involved new vector designs and transformations. The ZMM28 lead for example was improved by optimization using the ZM-GOS2 promoter and filtering chromosome insertion sites to select superior events. Initially lead optimizations were small-scale redesign efforts, primarily to meet product placement and regulatory objectives. Optimizations grew to comprise large structured experiments, both dominating the pipeline and emphasizing improved performance. Later still gene editing itself became the chief single-step optimization, when it emerged as the preferred product development alternative to transgenics.

[0721] While small scale lead optimizations brought successes, a more systematic approach to optimization was. We sought to vary gene expression and chromosome locations through creating a matrix of constructs and new transformations using diverse promoters, regulatory elements, introns, and terminators. Random insertions to vary chromosome locations were used, but subsequent matrix optimization experiments used SSI (site-specific integration).

We claim:

1. A method of improving yield of an elite maize plant, the method comprising:
(a) introducing into an elite maize plant cell a heterologous polynucleotide comprising a sequence at least 95% identical to SEQ ID NO: 1, or the heterologous polynucleotide encoding a heterologous polypeptide comprising a sequence at least 95% identical to SEQ ID NO: 288;
(b) regenerating an elite maize plant therefrom;
(c) subjecting the elite maize plant to an environmental condition; and
(d) assessing one or more characteristics of the elite maize plant;
wherein the one or more characteristics demonstrate increased yield or improved agronomic characteristic of the plant, as compared to an isoline maize plant not comprising said heterologous polynucleotide or heterologous polypeptide.

2. The method of claim 1, wherein the heterologous polynucleotide is operably linked to an expression element.

3. The method of claim 2, wherein the expression element regulates expression of the polynucleotide in a tissue-specific manner.

4. The method of claim 2, wherein the expression element regulates expression of the polynucleotide in a constitutive manner.

5. The method of claim 1, wherein the introducing of step (a) is achieved via particle bombardment or bacterial-mediated transformation and further comprising introducing into the cell a morphogenic factor.

6. The method of claim 5, further comprising introducing into the cell a Cas endonuclease and guide polynucleotide.

7. The method of claim 1, wherein the environmental condition is selected from the group consisting of: water limitation, water overabundance, nitrogen limitation, and nitrogen overabundance.

8. The method of claim 1, wherein the one or more characteristics is selected from the group consisting of: plant height, plant biomass, canopy architecture, root biomass, root length, root architecture, water use efficiency, water uptake efficiency, nitrogen use efficiency, nitrogen uptake, nitrogen metabolism, leaf color, pollen mass, seed weight, number of seeds, moisture content of seeds.

9. The method of claim 1, wherein the plant is maize.

10. A recombinant construct comprising: a polynucleotide comprising a sequence at least 95% identical to SEQ ID NO: 1, operably linked to a heterologous expression element.

11. A method of increasing grain yield and/or one more agronomic characteristics of an elite maize plant, the method comprising introducing one or more nucleotide modifications through a targeted site-directed modification at a genomic locus of an elite maize plant, wherein the genomic locus comprises a polynucleotide encoding a polypeptide that is at least 95% identical to SEQ ID NO: 288, such that its expression and/or activity is modified; and wherein the grain yield and/or agronomic characteristic is improved compared to a control maize plant not comprising the one or more introduced modifications, and wherein the method further comprises introducing into the elite maize plant a morphogenic factor.

12. The method of claim 11, wherein the one or more introduced nucleotide changes at the genomic loci is selected from the group consisting of:
(a) generation of one or more alternative spliced transcripts of a polynucleotide encoding the polypeptide;
(b) deletion of one or more domains of the polypeptide;
(c) frameshift mutation in one or more exons of a polynucleotide encoding the polypeptide; and
(d) deletion of a substantial portion of the polynucleotide encoding the polypeptide; and
(e) modification of one or more nucleotides or deletion of a regulatory element operably linked to the expression of the polynucleotide encoding the polypeptide,
wherein the regulatory element is present within a promoter, intron, 3′UTR, terminator or a combination thereof.

13. The method of claim 11, wherein the expression and/or activity modification is selected from the group consisting of:
(a) reduced expression of a polynucleotide encoding the polypeptide;
(b) reduced activity of the polypeptide; and
(c) repression of an enhancer motif present within a regulatory region encoding the polypeptide.

The application's sequence listing, which the Patent Office published only in electronic form, follows.

SEQUENCE LISTING (567 sequences)

SEQ ID NO: 1 - DNA, 639 bp, Secale cereale
atggacgccgccgacgccggctccccccgttttgggcacaggacggtgtgctcggagccgcccaagaggccggcagggcggaccaagtttaaggagacccgccacccgctgtaccgcggcgtgcggcggcggggtcggctcgggcagtgggtgtgcgaggtgcgcgtgcgcggcgcgcaagggtacaggctctggctcggcacattcaccaccgccgagatggcggcgcgcgcgcacgactccgccgtgctcgcgctcctcgaccgcgccgcttgcctcaacttcgccgactccgcctggcggatgctgcccgtcctcgcggcaggctcgtcccgcttcagcagcgcgcgggaaatcaaggacgccgtcgccgtcgccgtcgtggagttccagcggcagcgccccttcgtgtccacgtcggagacggccgacggcgagaaggacgtccaaggctcgccgaggccgagcgagctgtccacgtccagcgacttgttggacgagcactggtttagcggcatggacgccggctcttactacgcgagcttggcgcaggggatgctcatggagccgccggccgccagagcgtggagcgaggatggcggcgaatacagcggcgtccacacgccgctttggaactag

SEQ ID NO: 2 - DNA, 873 bp, Hevea braziliensis
atggaattatacaacggtgagaggccaagtgtgttcagacttttagagaagtatatgagaaaagggttatatagcatcctaacccagggtcccatccctactcatattgccttcatattggatggaaacaggaggtttgctaagaagcataaactgccagaaggaggtggtcataaggctggatttttagctcttctgaacgtactaacttattgctatgagttaggagtgaaatatgcgactatctatgcctttagcatcgataattttcgaaggaaacctcatgaggttcagtacgtaatggatctaatgctggagaagattgaagggatgatcatggaagaaagtatcatcaatgcatatgatatttgcgtacgttttgtgggtaacctgaagcttttaagtgagccagtcaagaccgcagcagataagattatgagggctactgccaacaattccaaatgtgtgcttctcattgctgtatgctatacttcaactgatgagatcgtgcatgctgttgaagaatcctctgaattgaactccaatgaagtttgtaacaatcaagaattggaggaggcaaatgcaactggaagcagtactgtgattcaaactgagaacatggagtcgtattctggaataaaacttgtagaccttgagaaaaacacctacataaatccttatcctgatgttctgattcgaacttctggggagacccgtctgagcaactacttactttggcagactactaattgcatactgtattctccttatgcactgtggccagagattggtcttcgacacgtggtgtggtcagtaattaacttccaacgtcattattcttacttggagaaacataaggaatacttaaaataa

SEQ ID NO: 3 - DNA, 873 bp, Hevea braziliensis; identical to SEQ ID NO: 2

SEQ ID NO: 4 - DNA, 1116 bp, Zea mays
atggtgctggctgcgcacgatccccctccccttgtgttcgacgctgcccgcctgagcggcctctccgacatcccgcagcagttcatctggccggcggacgagagccccaccccggactccgccgaggagctggccgtgccgctcatcgacctctccggggacgccgccgaggtggtccggcaggtccggcgcgcctgcgacctgcacggcttcttccaggtggtggggcacggcatcgacgcggcgctgacggcggaggcccaccgctgcatggacgccttcttcacgctgccgctcccggacaagcagcgcgcgcagcgccgccagggggacagctgcggctacgccagcagcttcacgggccggttcgcgtccaagctgccctggaaggagacgctgtcgttccgctacaccgacgacgacgacggcgacaagtccaaggacgtcgtggcgtcctacttcgtggacaagctgggcgaggggtaccggcaccacggggaggtgtacgggcgctactgctctgagatgagccgtctgtcgctggagctcatggaggtgctaggcgagagcctgggcgtgggccggcgccacttccggcgcttcttccaggggaacgactccatcatgcgcctcaactactacccgccgtgccagcggccctacgacacgctgggcacggggccgcattgcgaccccacgtcgctcaccatcctgcaccaggacgacgtgggcggactccaggtgttcgacgccgccacgctcgcgtggcgctccatcaggccccgcccgggcgccttcgtcgtcaacatcggcgacaccttcatggcgctctccaacgggcgctacaggagctgcctccaccgcgccgtcgtcaacagccgggtggcacgccgctcgctcgccttcttcctgtgcccggagatggacaaggtggtcaggccgcccaaggagctggtggacgacgccaacccgagggcgtacccggacttcacgtggaggacgctgctggacttcaccatgaggcactacaggtcggacatgaggacgctcgaggccttctccaactggctcagcaccagtagcaatggcggacagcacctgctggagaagaagtag

SEQ ID NO: 5 - DNA, 978 bp, Zea mays
atgaagcccgtggctactgatagccatcttgatctgaaccaaatgccaagcgttggttcaaaagatgtccctggaagagcttattgtactattttgagcccaccttcacaggcatacaatttggactcatcaggcttgttttctttttctataccaactacgcagcctttaacttcatatgcaatgtcgtcactagttgatggttctgctgttacattggcggcacaaggtctgcaaagtgattctgtccgtgacaagggcctagaaatcgactctgtacatgagaagggtgttgaggttggctcaacgcctgatcctgctggggttgaattagaatctgcaccagccaaaagaggtgcagaattatcttcaaagattgagttgcattctatccttggtcctctttgttatcaaattccaaacatggaagatgtggtcccaatcagtaccccgctccgttctgaacataatagtgcacagaaaacatcacaacattgcatgtcacccaatggttatacttctccctctgcaacgattggaaacgtatcaagtcagctaactgttgattcaattttgaggattgctgctgacacctttccatgtactccttcaatactaaggaaaagaaaacgtgataaagcaacacctgcttcgggtaatgagttaaagacaggtggagtaaccaatgatagcttttacactcctaatcgaacgaatgggaaggatactacttctccaaggtcgtttaaaactgctgcatcttttttgtcgctgggttctgttaatgggttattgacttctgcaaggagctttgattcttcaccaccctatcagaagaaaaggtcaaaaagaatggccatcatcaaatcagttgagaaacagctagatttttcagcagatggactggatacttctggttctgagattatgaactctccttgccataattcccaaggtgcaaattctaacaggatgtag

SEQ ID NO: 6 - DNA, 978 bp, Zea mays; identical to SEQ ID NO: 5

SEQ ID NO: 7 - DNA, 3864 bp, Zea mays
caactccgagtctatctcaaaatagtttagccatctcttccctaattttctacattgcactcggtggcagaccaccggaccctaggctgtggggttcattcggtcgggcattgttatgccgaccttcttgccatgaccgattgataatgttgatcggcctgtgatcatatggcgtgttgtgggttaaatatgtagggggcagaacatactgccgttgtggtatgtaataatttggtgcatagtgtgcgacagtaggttctgtgtatgtgtatccgatatgtccggtggtacatctgaactggccggttgtgttagctattattggggcgccacgcggtagccctggtgcggtcccggactatccggcagagaaagccggacggtctgtgtaagggccgaactatccagacaaaagctcggacggtccgaccgtgtagagggccgccgatctgccaagcaaggacgatggtgatggtatttgccctggatatgagttcatcaacataccatataatggatggggctgcaaatccccatttgtcgccgatgtattagacataaatatcatgttactagtttcatatgatggaaaactaggagcaacagacttctccaacatacacgttaattttctaattggttcttctaaccctctaatctaatgcttcatttgattatgcaaatggtctacatactgtttaatagattggatgtcgtcgggtttacttacgttagggacttgaagcgaagatagaagagatgtgacgtcggtatcgcatgtttgacaactttctggtgacgatccaccatgtattgtgacaagaatttctccttcgtttgacacatgtagtcctcgtattgttgttgctcatcggtcgtcggactcttaatagccggctttaggatattgtccggggagatatcggtgtgatctttagaaccggccatttgatggcctgagttttagtagatctagacacatttccccaacggagtcgccaaaaagtgtgttggcgccgatccaggcgcgaaacactggagatggaccgtttggcggtgttctctgcggaggtgaggacggtccgcgacctggcgcagcagcgactctcctctacgtgtgtccggacggtccgcgtctggggctcggacggtccgcgatggcgcagagggtcttcttcttcgcagccgacctagatctcgcctcccgggagggaccccgtcggggaggagagattgtagggtgtgtcttggcgtcgacaggccacacaatacgcctctagtcgacgtagagccgaagagaggtgaaggattgaggtagaaggaggctaaacttgggctaaactagaactactgctaatgcataaggtaaaaacgagaagtggacttcatttgatcgattgtggaaggtttaatcgactgtagccctttatctatataaaggggaggtatggacccgttacaagccgtttcccgagctaatctcacggttttagttaataaatcctgcgagaaactcggaactctaactgattctactcatgcgcgaaccattcgtgccgccaccgctgcccgtccggctacgctcagttaaccctgtgttgtgcgctgtgatttggtggcatataaaaccacatttgcaataaaaatttgtagggatttaacataccaagtgctgcggaaaggaatcgttttcggaggacccaaaattaaagaggcagatgctagagctcgtccagctcagcgctgagcacctgtgttgtcttcctcgtccacgccggcggagatgaacggcaacaaaggcggaaaggccgagacgctgagctcaaggacgtgacaccgcgcgtacctcgcgttcagttggctcacacaacagcagctcgctcgccccaagctcccgcgtcctgatccgtaggtgagccatgcaaaggtcgccgcgcgccctgatccattgcacccttcaaagctcgaacctacaaatagcgtgcaccaggcatcctggccacacccacacagcaagccagcagagcagaaagcagccgcagccccagcccccacaagacgaggcaacaatggcgctagaagcagccaccgccccccgcgcactcctcgccgcgtgcctcgtcctgctggtcctcggcggcggcaccggcccgtcgtcggtgctgcgcggcgccggggcgcaggccggcgggcagtgcctgccgcagctgaaccgcctcctggcgtgccgcgcgtacctggtgcccggcgcgccggaccccagcgcggactgctgcagcgcgctgagcgccgtgtcgcacgagtgcgcctgcagcaccatgggcatcatcaacagcctgcccggccggtgccacctcgcccaagccaactgctgtaagcttgtagccaggccgcaacggcttcgtctcttcatctcggtgctatgctaagcttattaatcttatgttttcctgcggttcgtgttcaccatgcagccgcttgaagcagggacctggcacgcgtgctgcaatggatggcaggaggggagaggaataagaagtgtttccatttcacagtgagagcagtcgagctccaacgttgtcgtcgtcgtcgtcttcttcttttgatattcagactctgtcttgcggtctatatcatcagcataataataataaaataagtaaaaccaaaccatgcatgaccatgctatacatgttgcgagttccagcgagacggttaactataatgactgcaacaaaggattctgttcgttttgacacgtgatcacgtaagaataccgctcaggagaccaacacggatggtctaaaccactatctccaaagtaaaccatactcaagtcttaaaaccgcaagagctacagttgttctgaaatctgaatgtagaactgcccatctgcacagtcagatcgaaacacctccgtttcagagcacagaagatggcgacgggatctctagagatcagtaatcattcaaccgctgcagtattttcatgaacacacgccaggcacgatctaaatgaccgattttataagtgcatatactactcgaccataactccagaaccttgtactctacgcagacagtttttctaggaacagagcttcctgcttgctagtgagaccgagatcgctcagtgacatctggctctccaattcagtgaaggcacgcctgggataagacctcgcctgtccaaagaaatatcacaatatcactacggttacaagaattggtcagggggagatgaaaaacttcacgtagagtctaaggaagattctgatgtctccccttaacaaggctcactcgtgccatcacacaatactataaaacaacataaccgactaactgaccagcaaaaatgcaatgctgatgaacaaaaaagattgttcgtgcaattttcgttattctccaagtttctcggctcatactaacttaacttcttgactgacctgactacttaacagacaccagagcaattgatgctacaagcctatgacaattaacaagtgcttaagattaaggactaaacaggagatcccactaaacccacgtagatagttccaaatggtttgataaaatagttcagatttgaagaggtggaagtcatcatttgtacaaatggataggtaccacgaaaattgccaggtgaagttaccaaaataaaaggtcctgcaatggtattctgaaacaatagtatttttttttctttcttgttagcacaaagtgtgaataaccagctggtgctcataccatatctccagtataataagctatggactctaactgtacatcttttatcagtaaatattgctttgcaaaaacacattgaaggaggtagatgagaattaccagtctataagttcctggt

SEQ ID NO: 8 - DNA, 1551 bp, Zea mays
atggagaagaggaacctgcagtggcggcgagggcgtgatggcatcgtgcagtaccctcacctcttcttcgcggccctggcgctggccctcctagtcgcggacccgttcggcctcagtccgctggccgaggtcgactaccggccggtgaagcacgagctcgcgccgtacggggaggtcatgggcagctggcccagagacaatgccagccggctcaggcgcgggaggctggagttcgtcggcgaggtgttcgggccggagtctatcgagttcgatctccagggccgcgggccgtacgccggcctcgccgacggccgcgtcgtgcggtggatgggcgaggaggccgggtgggagacgttcgccgtcatgaatcctgactggtaagtgctcgatatcgctccggcgtccactcgttacatgctataatatagtagtactaagatattttgatctgattttttgcattcttgggagaaacgtcatgcaaaatttgttgtttcttggcaaaggtcagaagaagtctgtgccaatggagtgaactcaacgacgaggaagcagcacgagaaggaggagttctgcggccggccgctcggcctgaggttccacggggagaccggcgagctctacgtcgccgacgcgtactacggtctcatggtcgttggccagagcggcggcgtggcgtcctccgtcgcgagggaagccgacggggaccccatccggttcgcgaacgacctcgatgtgcacaggaatggatccgtattcttcactgacacgagcatgagatacagcagaaagtgagcaaagcgacgtaacaatccggcttctcattttcaaacgcctctgtattctctgctgaaagagtagctcaccagacaagagctgaatttgcagggaccatctgaacatcctgttagaaggagaaggcaccgggaggctgctcaggtatgatccagaaacaagcggtgtccatgtcgtgctcaaggggctggtgttcccaaacggcgtgcagatctcagaggaccatcagtttcttctcttctccgagacaacaaactgcaggtaacaaaaatactatctgacgatgctcatgattctaccgtatccatagtcatgaacacaaaccacacgaatctggccttgaccaggataatgaggtactggctggaaggcccaagagcgggcgaggtagaggtgttcgcgaacctgccgggcttccccgacaacgtgcgctccaacggcaggggccagttctgggtggcgatcgactgctgccggacgccggcgcaggaggtgttcgccaagaggccgtggctccggaccctgtacttcaagttcccgctgtcgctcaaggtgctcacttggaaggccgccaggaggatgcacacggtgctcgcgctcctcgacggcgaagggcgcgtcgtggaggtgctcgaggaccggggccacgaggtgatgaagctggtgagcgaggtgcgggaggtgggccgcaagctgtggatcggaaccgtggcgcacaaccacatcgccaccatcccctaccctttagaggactaa

SEQ ID NO: 9 - DNA, 1050 bp, Zea mays
atggccgccgagatcaatgggggcttcctcgccgccggcgggcccaggcagcaccgcgggggcctcggctgcggccgctgtttccagaacatatcacttctccatggtctggggattaaatttgttcttgttccaggaacacatattcaaattgataagctgttgtcagaaatagggaataaggccaagtatgttggtcagtacagaattactgatgaagatgcaagaaaggctgcaatggatgcagctggtagaatacgattgacaatagaagctaaactttctcctggtcctccaatgttaaatcttcgtaggcatggtgttattggacgctggcatggtcttgtggatagcattgcaagtggcaatttccttggtgctaagagaagaggggtggttaatggtattgactacggattcaccgaggaagttacgaaaatagacgtttcacggataagagaaaggcttgatagtgatagcatagttgttatcagcaacatgggcttcagttcatcaggagatgtgttaaattgcaacaccaacgaggttgctactgcatgtgctttagccttggaggcagataaacttatctgcgttgtagatggtcaggtatttgatgagcatggacgggccattcaatacatgtctattgaggaggcagatttcttgattagaaagcgtgctaggcaaagtgatattgctgcaagttatgtcaaggttgtggatgaggaaggcatcaattctttgcataaaggggacaacagaccatcattgagtcccaaggcttacataaatgggtatgctgcttcttttcgaaacggattgggttttaacaatggaaatggtatttattctggcgagcaagggtttgctattggtggcgaagagcggttaagcagatcaaatgctgatccttttcaaaacgggttgggttttaacaatggaaatggtatttactctggtgagcaagggttcgctattggtggtgaagagaggttaagcagatcaaatggctatctttctgagttggtcgcggcagcatgtgtgcca

SEQ ID NO: 10 - DNA, 900 bp, Arabidopsis thaliana
atgagtgagaccactaaggacgatggctctagccaaaaaaaatcagtgcgtaaggaaaaaagagcgtatgttttaaggaaatggacccagttcgatgttgggagagcttcgactgttggaaccgtgcatctgttgtgtctattggctccttttaactacaaatgggaagcattccggttcggtataattctcgccatactgacaaacctctgcattacattctcgtaccataggaacttgactcaccggagctttaagctaccgaaatggcttgaatatccattcgcttattctgctcttttggcacttcagggtgatccattggattgggtgagcatacatagattccatcaccagttcacagattctgaccgtgatccacatagccctatagaaggattctggttcagtcatgttttgtggatatttgacaccgattatatcagagaaaagtgtggaagacgtaacaacgtgatggacttgaagcaacaatggttctataggtttctaaaaaagacgttggttctccacatcttagcattttggaccctcatctacttatggggtggtctaccttacctaacttggactgtgggttttggaggagtaattggttaccatgggacttggctcgtaaattcggcatgccatatttgtggttcgcaagcgtggcaaaccaatgacacctcacgtaacgtttggtggctagcgctattgactatgggagagagctggcacaacaaccaccatgcctttgagacgtcggctaggcacggactagaatggtatcagttagacataacttggtacctcatttggttcttccaggctctcggtttagccaccaatgtcaaattacctaccgatgctcagaaacgcaagatggctatccgtcgttaa

SEQ ID NO: 11 - DNA, 1989 bp, Arabidopsis thaliana
atgggtaacggagtaacaaaactgagtatatgtttcacaggcggtggaggagaacgtctccggccaaaagacatctccgttcttcttccggatcctttagacgaaggtttaggtcactccttctgctacgtccgaccagacccgactctaatcagttcctcaaaagtccattcagaggaagacacaacgacgacaacgttccgtacaatctccggcgcttccgttagcgccaacacagctactcctctctcaacttctctctacgatccctacggtcacatcgaccgcgccgccgcattcgaaagcacgacttcattttcgtcaatccctcttcaaccgatccccaaaagctccggtccgatcgttttaggctcgggtccgatcgaaagagggttcctttcaggtccgatcgaaagaggattcatgtcgggtcctcttgatcgggtcgggttattctcaggtccgcttgataagccaaactcagatcatcatcatcagttccaacgtagcttctctcatggtttagctttacgggtcgggtcaagaaaacgatctttggttcggatcctccgtagagcaatctcgaaaacgatgtcaagagggcaaaactcgatcgttgctccgatcaaatccgttaaagattccgataactggggaattaggtcagaaaagagccggaatttgcacaacgagaatctcacagtgaatagcttgaactttagcagcgaagttagcttagacgacgacgtttcactcgaaaaccagaatcttcagtgggctcagggaaaagccggtgaggatcgagtacacgtggttgtatcggaggagcacgggtggctcttcgtcggaatatacgacggattcaacggtccagatgcgccggattatcttctctctcatctctatcctgtcgttcatcgagagctcaaaggattgttatgggacgattcaaatgtcgaatccaaatctcaggatttagaaaggtctaacggagacgaatcttgttcaaatcaggaaaaggatgagacttgtgagcgatggtggagatgtgaatgggatcgtgaaagtcaagatcttgaccgtcgattaaaggaacagattagtcggagaagtgggtcggatcggttaacgaatcattcggaagtattagaggctctgtcacaagctctgaggaaaacagaggaagcgtatttagatactgcagataagatgctcgacgaaaatcctgaactagctttgatgggttcttgtgttttggtcatgttaatgaaaggtgaagatatttatgtgatgaatgttggtgatagtagagctgtgcttggtcagaaatcagaaccggattactggttagctaagattagacaggatttggaacggattaacgaggaaacgatgatgaatgatttggaaggttgtgaaggagatcaatcatctttagtcccgaatttatcggcttttcagctcactgttgatcacagcacaaatatagaagaagaagttgagagaatcagaaacgagcatcccgatgatgttaccgcggtaacgaatgaacgggttaaaggctccttaaaggtcacaagagcgtttggtgctggtttccttaagcagcctaaatggaacaatgcacttcttgagatgttccaaattgattacgttgggaagtctccatacatcaactgcttaccgtctctctaccaccacagattagggtccaaggaccggtttctaatactatcatcggatggtctctaccaatacttcacaaacgaagaagctgtttcagaggttgagctcttcatcacattacaacctgaaggggatccagctcaacaccttgtgcaagagcttttgtttagagctgctaagaaagctggtatggatttccatgaattgctagagataccacaaggtgaacgaagacggtatcacgatgatgtttcaatagtagtgatctctttagaaggaagaatgtggaaatcttgtgtatag

SEQ ID NO: 12 - DNA, 237 bp, Arabidopsis thaliana
atgagcaatcttcgcctaaccattgcagtgtttttggccgctctttttcaaactctgtggtggaagccaaggggaaagaggccacaatcaaattttcatgcaaaaagaattcggactgttttacaaacattgcttgttatgctttgtactgattaccgatgtgataaaggattatgtaaatgccatggttttggtggagaaaaggaaaatcccacagctgcgccattaactgcttaa

SEQ ID NO: 13 - DNA, 804 bp, Arabidopsis thaliana
atggctacatctgctagaagagcatatggattcgggagagctgacgaggcgactcacccggactccattagagccactttggctgagtttctttccacgttcgtcttcgtctttgctggagaaggctcaatcctcgctctagacaagttgtattgggacacggcggctcacacggggacaaacacgcctggagggttagttctggtggcgttagctcatgcattggccttgttcgcggctgtttctgcagccatcaatgtctctggtggccacgtcaaccccgctgtcacttttgctgctctaatcggaggcaggatctcggtcattcgagctatctactattgggttgctcagcttataggtgctatcctcgcttgtctcttgttgaggcttgccactaatggcttgagaccagtaggtttccatgtagcatcaggagttagtgagcttcatgggctactgatggagatcatacttacatttgctttggtttatgttgtctactcgaccgcaatcgatccaaagagggggagtattgggatcatagcgccactagccatcgggctcatagttggggcaaacattttggtgggaggacctttcgatggagcctctatgaatccggctagagcctttggtccagcattagtgggatggaggtggagtaaccattggatctattgggttggaccgttcattggtggtgcactcgccgcactgatctatgagtacatgatcatccccagcgtgaacgaacctcctcaccacagtacccaccaaccattggctccggaagattactag

SEQ ID NO: 14 - DNA, 2835 bp, Arabidopsis thaliana
atggagagtgcggtccaagtaaacgggtttcatccgcaccgtgagatcacttctcaaggaggtgtgaacggttgtgttaatgcacgaattaaacaagtacggggcgctacgaggcgatgccgtttcgagctggtggttctagtgagctggctcttctgggcgagctggctgatcttcgacgagcagacttctctcgacgagctgacttgtatcgatgagctggctcttccgggcgagctgacttgtgctatcctttctccaggtcccgaaaaacgtcccttctcccgagactttctattccttatttatacccgtccgtatagtagggtacgcaagatcagcgaaactgacgcgcctgtggcttcgtccttttcgatgcagcgcgtggatccaacgtgccttctgattcgtgcacttggtttcttgcggattcggaagctgaagcgttctctctccgaccatcgtcgatctcgcaccccggacggttcttcagagcgttctggagccgaccgttttcgagccgaatctcttgatgacgatcttgtcgaggcgggatattcttcctctgggtcgtcttcgcgaacttctgttgtggccgagctacggcgccgcatttcttctcctctagttgaccgggctgaaacaggtgctgcggcgaccaccactttcaaaccccggcttacagatgaggaaattggtgatgaggatttcaaggaagccatagcttctgaggagatcgcgatcttcgaacctcgatctgcggttgggggaggttttggggacgatgttaaggagatgacagtttctgatgagattggtgtatttcctggtgtatccggccctaagcccggctcggctgactatctgggaccaaccaagacgtcggcttcttccatgagtaccgcgcttcgcttttgtaacgcaccgcgtggtttagtggctcgggtcccggaaacgcacgagcgtccttggacgactccggagggttatatgtgcgtctacgagaagtttctcactgagtgcggcttgtcgtttcccatcccgatattcttgcttggattcgtcgccaggagaaagatggcactttctcagctgaccgtcgcggcaattcgttatgctgttggattgattcgcttggccgagcagtgcggagtcgaagttcggcgttcccattatgaggaagttatcaacctcaagaggattggtagtgctcggcccggattttattacgcgcagtcagcgacgaagccaaagattattaccggggtgaagagcaaaactaatgactggtgctttgaatacttctttgtcaaagtgaccaaagagtcggtcggagatcacgagatggtggatttatctgaatggcggatgacgcccgttcgtcgtttaaagattcttgacccgttccccgaggagctcaaagaagatcttctgaagattcgcgctgttagcccatacgtttggccgacgggcgaagagaaggaacgcttatccttacacaagccgaagaaagctagaaaaactccagcgaaaaggaagatgaagatgaataccgaagaggtcgggagttactcatctcgctacaaacgtcagaagacatcagcactgaaggaatctcaggagaaggatcaccttccgagcggggaggatcgggctgcgcgttcagttgaggaagagaggcgcactgcccgatccgagcctccgagaggtcatcaggggcgtagcgtcgtgaacccggggtcgtctgttgatcgctccaaggagactcgggagaaggagctggctacggctcggcagggaaagcagctggaaggttctgctcgctctgatgttccaccgggatgcaacactttgattgttcatcctggtcccgccaacgacccccatcgtaggcgatcctcgggggccattgaggagatccgttctgacgcaagggtttcgaagcagcccgactaccgctgggagcattactactcgggtcgtgaagtcaaggaattaaaggagatgaaggcctttaccgacgttgcgaggaagacgctcgatgctgttggctcgatgaaccgtctggcttatctgtacgagcgtcgtttccgcaacatggaagtgctgggctcgcaggatcttcgtggggagttgagtgctgagaagaagaagaacgacgagctcctgaagaagttggagtcggcgagcaaagaggccgcgcaccttaagagtgaggtagcgacgttggcttaccagcgaaccgttatgggtgaggagagggatcgttgcaccctggatctggagaaggagagggagaaaacggtcgagctggaggatcggctgaagtccgagaagaagaggcttcggtcccgtcgtgagaagtacgcggagaatcagacgagtaaagccttgattcatgttgctgacctctttcaagctcgcatgaatcgagtgaaggcccatctcgatgacaagctgaagatcaaccccaaattcctcgattacaaccaagtctgtgggaacgtcgctcttttggatgagctggttgaggctggggagatcgagatcaaatctaccgagctgatgccacgtttgattgcggatcgggatgccctcaaggccgaggtggagggctttgagatcaccgagatcgagaaggatgactttgacgtctggacccttttcgagaaggttctcgaggaggaacatttcgaaccatcggctagcggaggtcattctgagaccgaggcagaaaaagatgaggagacttcggttgaggatgctagccagcggaagccggagactcccgggccacttcctgacgacccggctgctgccccggtgccggagtga

SEQ ID NO: 15 - DNA, 1194 bp, Arabidopsis thaliana
atgtgcaatcaaactcctcttagatctatggctctcgattcttccggaaaacaacctgagcagcagcaacaacaacaaccacgagcctcctctggaaacggcgaggcaagattgaagcttcggagaacccctaatgaagaacatgagcctgagaactatgaagatctacctttggactatagtccttctctgttcacctctcttgagcgttacttacctgagcagcttctcaattccacacgaatcgataaagctagtttcatgagagaccttcttctccgatattcccctgatactgagcgagttcgggttctgaggcataaagaatacagagacaaaatcatgtcttcttaccaacgtctgcatggagagatctatactcttgaccctagtagtttctttgcgccatcgtttcttggagcttttagtcggaagtcagagccgaatttcagaagtagtatggttgaatcttatcctgggattttcacttttgaaatgtttaaaccacagttttgtgaaatgttattagcagaggttgaacatatggagaaatgggtttatgattcaagatccacaataatgagacctaatacgatgaacaatttcggtgttgtccttgatgattttggctttgatagcatgcttcagaagttggttgatgactttattagtcctatagctcaagttctgttcccggaagtctgtggaacctctttagattctcaccatggctatattgttgaatatggaaaagatagggatgttgatcttgggtttcatgtggatgactcagaagttagtttaaatgtctgcttgggtaaacaattctctggcggggagctgtattttcgaggggtgagatgtgataagcatgtgaattccgatagcactgaaaaggaagtttatgattactctcatgtacctggtcacgccattcttcatcgtggacgtcatcgccatggtgctagagctacaacttctggacaccgagccaacttgattttgtggtgtagaagctcaacttttcgagagatgaagaattatcagagagatttctcaggttggtgtggaggatgcaaacttgataaacagagaaggcagcgtgattcgattaatgcaactaaagagatactagcaaggaaagctgcagagaagacacttgttgagctggcttcaaaatcatgtgccgagtaa

SEQ ID NO: 16 - DNA, 423 bp, Arabidopsis thaliana
atgctaatcacagttctagttatcttcaaaacatcgttagcgtttgaaaacttttcatctgtcgatggtaatttcccgttctcacctaaacatgttataatcatcaacactttgcacccacatggaaaattatacgtgcactgtaggaataaaggggaagatttagggcttcataagatagaatatcgagaacaaatagatttcaggtttcgtgtcaatctacgcagaacaacaacatacacttgtaaattctcgtggccaggaaatgaaaagacgttcgatatttttagagcggatagagacgatagttcaaaaagtacaagtggaatatgtagagaatgtatttggtatatttgtgagacaggtccatgtcgtgctagacgcgatggaggggatccattctgtttttcatggacatcttag

SEQ ID NO: 17 - DNA, 684 bp, Arabidopsis thaliana
atggctcagaacgatacagtgaagctgataggttcttggtctagcccttattcccttagggcacgtgtggctctacacttgaaatctgtcaagtacgagtacttagacgaacctgatgttcttaaagaaaagagtgaactccttctcaaatctaaccccatccacaagaaagtccctgtcctcctccatggtgacctctccatctctgagtccctcaacgttgttcaatacgtcgacgaggcttggccctccgttccttcaatccttccttctgatgcctatgatcgcgcatctgctcggttttgggctcagtacatcgatgacaagtgttttgcggcggtggatgcggtggtcggagcaaaagacgacgaagggaaaatggcggcggtgggaaagctgatggagtgtttggcgatacttgaagaaacgtttcagaagagcagcaaaggattagggttctttggaggagagaccatcggctaccttgacattgcttgttcggctcttttaggtccgatctctgtgatcgaggcgttttccggcgtcaagtttctccggcaagagacaacacctgggttgatcaaatgggccgagaggtttagggcccatgaagctgttaagccctacatgccaaccgtcgaagaggtcgttgcattcgcaaagcaaaagttcaatgttcagtga

SEQ ID NO: 18 - DNA, 405 bp, Arabidopsis thaliana
atgtcatcggcgcaaatggatccacacgacaagatgagatcgcgtgacataagtaaagtcgcgagaggccagcaagcaccaagaccagctcacactcccggtacggtgtcacccccaccggaaaatgaggcaacgtttcgagcaaagagaggagatagtggaagagagacggatgccgcggtggaagaacgttttccagtgactaatgaaacgcgacattgtttcaatcggttcatgcaataccataagtgtattgagaaaaatggaagagatgcgaatgattgcaacaacttgagagattacgtacgttcaatttgtcccgaagaattggtgagcaaaatttggttgaaaagtgggaggaacaaagaaagtcagggacattaccagcgtcaatatgaagattag

SEQ ID NO: 19 - DNA, 1026 bp, Arabidopsis thaliana
atggctccgactttgcaaggccagtggatcaaggtggggcagaaaggaggaacgggaccaggacctagaagttcacacggcatagccgcggtcggagacaagctctacagtttcggcggcgagttaacaccaaacaaacacatcgacaaagacctctacgtctttgacttcaacactcaaacttggtcaatcgctcaacccaaaggagacgccccaactgtatcctgcttaggcgtgcgcatggtggccgtgggaactaagatctatatctttggaggccgcgatgagaaccgcaacttcgaaaactttcgctcctacgatacggtgacatccgagtggacattcctgacgaagcttgatgaggtgggaggacccgaggctcgtactttccattcgatggcttcggatgaaaaccatgtgtatgtattcggtggggtgagcaaaggcggtactatgaatactcccacgcggttcaggacaatcgaggcgtataacattgctgatgggaaatgggctcagctaccggatccaggagataacttcgagaaaagaggaggagcgggattcgctgtggtacaagggaagatttgggtggtttatgggtttgcgacctcgattgtgcccggaggcaaagatgactatgagtctaatgctgtgcaattctatgatccggcttccaaaaagtggaccgaagtagagactacaggagcgaaaccttccgcaaggagcgtgtttgcccatgcggtagtgggaaagtatataataatatttgcaggtgaggtatggcctgatctcaatgggcattatggtcccgggacgctgtccaatgagggatatgcgttggacaccgagacactggtgtgggaaaagttgggagaagaaggtgcaccagccataccacgaggttggactgcctatactgctgccactgtcgatggaaagaatggcctcctcatgcatggcggaaagcttccgaccaacgagcgaactgatgatctctacttctatgcggtcaattcagcttaa

SEQ ID NO: 20 - DNA, 3843 bp, Arabidopsis thaliana
atgggtgaggaaggttcaatgtttggtctgggaggtgaatttccggttgatgattgtgatggtggttttgagtttgaagatgatgacgagactattgacatcgaaacgctttatcggattctagatgagaagcctgattctgctgagggtagccaagaaaacttatcaccagttggttcatctgctgacgagctcaaggattcacagttgctaaatggttcatttgatgaacatgtgaaaatggaagccgggctgagtccttcacctgctcatacttgctctgcaagtcttaaagattggttttcgttaagtcagggtgagcagcctgtggaaacatgtggagtatctcaatctgagatgactagttgtagtatatcgtctagtttctctgatcctgatggcaatatgatggccttcaatcctgtgaattgtgacgttgacactgtttccaagcaggatgataagataatcgattccaaatctatgttgactccatattttgacaacgtgactggatacggagtggggttgggagccaatcataattcgtctgccatgtctgttttttttaataattccaattccctcagtgacagtgcggataactatgtctcttctgcacaagattgctacaatacaagtggtacatccttgtcagaccatacccccaattctgttcagaatttcgcgtttgagttctttcctaataaagaagaagctgtaaatgatgttgagagtggagtaagtgagtctcagtcggatggtgccagccggatgatttttgatagacatggaagagtggataatggatctttagaaaggaaacctcctattgatttttctagtgcaagagggatcagtttcaagtttgaaagtaatccttcagtttctcctgcctgtgtcaaaccctacaacagttttgacagtcatttagctgatagtgaccttgaccggcctaataattattcatgcagttttcaggataataaaactgttcatgtgaaggttaaaccagaggctgaatcagagaaagttgtctacagttcagttccaggggaatttagtgtcagggatgatgcttatctttctggagaaaccaatcgttggtggtctggtgcatcaagctctgcagtctcctatcaaacagatattgaaaaaggatactcatatatggcaccgcaaacagctctacctagccaagacagtggcaagataagctccaatcatttttacgattcagatacatgtttgcaatatgttgtagaagatcccagcccagtgacacaaaacaatgagtataaagactttcaaattcaacaaggagaccgggaatatattcaaccgaggggcattgattctcaattctcaaatgccagctttgaatcagttcaaagccattcttcagaatgtatatccgatagtgatgatgattctgacgtctgcataatagaaccttatggtcaatctgcaatcccacatcgacctctagctatgaaaatgccggtagtttcttcagaatattctacagttagtcataattttaatcaatctggaggcctgaagcttcagtcaaataaagaaaatatgatctttcaagctgcattgcaggatctcactcagcctaattctgaagcaattctgcctgatggtgtcttgacagtcccgcttctgagacatcagcgaatcgcattgtcatggatggcccagaaggagacaagtggcttcccctgttcgggtggaattcttgctgatgatcagggtcttgggaagacagtttccactatagctcttatactgaaggaaaggtctaaacctgcccaagcatgtgaagaaagtacgaagaaagaaatttttgacctagaaagcgagactggagaatgtgcgcctttaaaacccagtggaagaagcaagcattttgaacactctcaattgctttccaatgaaaacaaagttggtggagacagtgtgggtaaagtgacgggaaggccagctgctggaacgcttgttgtatgtcccactagtgttatgcggcagtgggctgatgaattacataagaaggtgactagtgaagcaaatctctctgttctggtataccatgggtctagcagaacaaaggatcctcatgagttggctaaatatgatgttgttgttaccacattttctattgtaagtatggaagtgccaaagcagcctcttgttgatgatgaggatgaagagaaggatggtgtacatgatggtggaactgcagctactggcttttgctcaaacaagaaaaggaaatatcctcccgattctaaaaagaagggttcaaagaagaagaaagttgagtttctgtctggccctcttgcgaaagtttcatggtttagagttgttctagatgaggcacagagcattaaaaattacaaaacccaagttgcaagagcatgctggggccttcgtgctaaacggaggtggtgtttgtctggcactccaatccagaattcaatcgatgacctttacagctactttcgattcctcaaatatgatccttactcttcctacgtattgttctgtagcacgattaagaaccctataactaggaacccagtgaaaggatatcagaagctgcaggctatccttaaaacagtgatgcttcgccgaactaaaggttcacttcttgatgggaaacccataatctctttacctccgaagtccattgagttgagaaaagtggatttcactgtggaggaacgtgatttctactccaaactagaggctgaatctcgtactcaattcagggaatatgcagaagctggaacagtgaagcaaaattatgtaaatatcttgttgatgctcttgcgccttcgccaagcttgtgatcaccctcttctcgtgaatggtgaatacagttttacctgggaatcttctgttggattagctaagaagcagattcagtcagacgcttcattggcaatttgtggtatctgcaatgatgcacctgaagatgctgttgcttcagtttgcggtcatgttttctgtaaacagtgcatttatgaacgccttactggtgatagtaatcactgtccctttgcaaactgcaatgtcagactcaccatctcatcgttatcttccaaaacgagattggacgatgctatgcctgacatgcaggagcgtgctacttcgaatagccttagcccttgttctgatgaagatcttccatatggttcatctaaaatcaaggctgctctagagatcttacaatcactgcccaaagcacatgatttgacagattcaaatcagatctctgaaaacagagaatactccggtctttctataactcctgtgaagaatgagggtatgagcgttgatgttccgattaaggtagctggagaaaaagccattgttttttcccaatggacaaagatgctaaacctacttgaagcttctcttgtaagttcacatattcagtatagaaggctcgatggaacaatgtcagttgctgctagggataaagcagtgcaggatttcaacactctccctgaggttactgtaatgataatgtctctcaaggctgctagtctcggactgaacatggtggcagcttgtcatgttctgatgctggacttatggtggaacccaacaaccgaggatcaagcaatcgatagagcacatcgtataggacagacacgaccagtaacagtagttcgcttcacagtaaaagatacagtcgaagatcggatattagcccttcagcaaaagaagagaatgatggtagcctctgcatttggagaagatgaaaagggaagccgacagtctcacctcacagtagaggacttgagctatctgtttatggctgattcatga

SEQ ID NO: 21 - DNA, 2829 bp, Arabidopsis thaliana
atgaagaaaagaagaacctttcttctattttcatttacctttcttcttcttctatctctttctaaagctgattctgatggagatctctcagcgatgttatcactcaagaaaagcttaaacccacccagttctttcggttggtctgaccctgacccatgtaaatggactcacatcgtttgtacaggaacaaaacgtgtgacccggatccaaatcgggcattcgggtcttcaaggtacactttctcctgatctacgtaacttatcagagcttgaaagacttgagcttcaatggaacaacatctctggtcctgttccttctttaagtggtttagcttcattacaagtcttgatgttaagtaacaacaactttgattctatccctagtgatgtctttcaaggtttaacttcgttacaatctgtagaaattgataacaatccttttaagagttgggagattccagagagtttgagaaatgcttctgctcttcagaatttctctgctaattcggctaatgtttccggttctttacccggttttctcggaccggatgagtttcccggtttgtcgattttgcatttggctttcaacaacttagaaggagagttgcctatgagtttagctggctctcaggttcagtcattgtggctcaatggtcagaaactaaccggtgatattactgttcttcagaacatgactggtttaaaagaggtttggcttcactccaacaagttttcgggtcctttaccggacttttcgggtcttaaggagcttgagagcttgagtttgagagataactcctttacaggtccagttcctgcgtctttgttaagtcttgagtcacttaaagttgtgaacttgacgaataatcatctacaaggaccagtgcctgtgtttaagagctctgtttcagttgatttggataaagattctaacagcttttgcttgtctagtcctggtgagtgtgatcctagagtgaagtctttgcttttgatagctagttcattcgattatccgccccggctcgctgagagttggaaaggaaacgatccttgtactaactggattgggatagcttgtagcaatgggaacattactgttatcagtcttgagaaaatggaactaaccgggacgatttctcccgagtttggagcgatcaagtcgcttcaaagaatcattcttggtatcaacaatcttactggtatgattcctcaagagcttacaacgttacctaatctcaaaacactcgatgtttcgagtaacaagcttttcgggaaggtcccgggttttagaagcaatgttgttgtgaatactaatggtaatcctgacattggaaaggataaaagctctttgtcttctcctggttcttcttcgccttcaggtggttcgggttcaggtatcaacggtgataaagaccggagaggaatgaagtcttcgacttttataggaatcattgttggttcagttcttggaggtttgttatcaatcttcttgattggtttgttagttttctgttggtacaaaaagaggcagaagagattctcaggaagtgagagctcaaatgcagtagtggtgcatccgcgacattcggggtctgacaatgagagtgttaagattacagttgcgggttcaagcgtaagcgttggagggataagtgatacttatacgcttcctggtacaagtgaggttggagataatattcaaatggtggaagcaggaaacatgctgatatcaatccaagtgcttcgttctgtgactaacaacttcagttcagataacattcttggatcaggaggtttcggggttgtgtataaaggcgagttgcacgatggaacgaagattgcggttaagagaatggagaatggagttattgctggtaaaggctttgcggagtttaaatcagagattgcggttttaacaaaggttaggcatcgtcatttggttacgcttcttggttattgtttggatgggaatgagaagttacttgtgtatgagtatatgcctcaagggacattgagtaggcatttgtttgagtggtcagaggaaggacttaagcctctgttgtggaaacagagattgactttagctttggatgttgctagaggtgtggagtatctccatggattagctcaccagagctttatacacagggatcttaagccttctaacattcttcttggggatgatatgagggcgaaagttgcagactttggactcgttcgtctcgctcctgaaggaaaaggatcgattgagactagaatcgctggaacatttggttacttggcacccgaatacgcagtaacgggtcgagtgacaacgaaggtcgatgtatacagcttcggggtaatcctaatggaactcataacgggaagaaaatctctagacgaatcgcaaccagaagaaagcattcacttggtctcttggttcaaacggatgtacatcaacaaagaagcatcattcaagaaagcgatcgacacgacaatagacctagacgaagaaaccttagccagcgttcacactgttgctgaactagcaggccattgctgtgcccgtgagccttaccagagaccagacatgggacacgcagtcaacattctgtcatcactcgttgagctatggaaaccgtcggatcagaatccagaagacatatatggtatcgatctcgacatgtctttacctcaagcacttaagaaatggcaagcttatgaaggaagaagtgatctcgaatcttcaacttcatcacttttacctagcttggacaacacgcagatgagtattcccactagaccttacggattcgcagagtcattcacttcagtagatggacgatga

SEQ ID NO: 22 - DNA, 876 bp, Arabidopsis thaliana
atgattcaagacaagtctaaaggtgcaaagcaaacgcttctagagcggccatggttcctcgctgtggctctagctggtcttataggtggcgcaatgctcatcacaagcttcatccgagctacggacaacaccttgtcactctgctccacggctaagaacacagctgcgtctatagccaaatacacagccaccccaatccaactccaatccatcgtccactacgccacttcacacaccgtccctcaacaatctttcgaggagatctcgatctctttaaacgtcctcaaggagcgtctcccttgtaactttctagtctttggcctcggccgcgactccctcatgtgggcctccctcaatccaggtggcacaactgtgttcttggaagaggatcctgagtggatagaggccgtcctcaaggacgccccatccctcagggcccaccatgttcagtaccggacccacctttctgaggccggccgccttctctcgacttacaagaacgaacccatgtgtttaccagctaaagctttcccgatccgctacaacgaaaagtgtcccttggcgttgacttctctccctgatgagttctatgataccgagtgggatctgatcatggtggacgcaccaaaagggtacttcccagaggcgccaggaaggatggcggcgatattttcctcggccatcatggcacgtaaccggaaaggtgatggcacgactcacgtcttccttcatgacgttaaccgcaaagtggagaacgcttttgccaatgagttcctttgtgagaagtataaggtcaactccgtaggtaggctctggcacttcgagatacctaacgccgctaacatgaccgaccagcctggtgaccggttttgctag

SEQ ID NO: 23 - DNA, 552 bp, Arabidopsis thaliana
atgaatcactttgcggttcaaccaaacgcgttcgctgccggcggagatttgagaagcagctccgtttcagttgttgaaagagatcaaaccaccgtcgtttgtccaaaaccacgtcgtattggtctccgtaacaaccatcaccatccttctcgatctctccgttgttacttcagtcatcaattggagctttgtgaatccaaagcagagactgatatcttagatatcatactcaccaaggatggttatggtgcagaacaagttaataagcaggtaatagactcgccgtccccgtttttatgtgggtcgccgccgagcagagtcgctaacccattaacacaggatgctcgatttcgagatgagattgtatcggtttcttcagtgattccgcctcagttgggtttacctccttcttcatctccttcttcttcctctgggaggaaaggaggatgtgttgttagaggcaattttggtaacagcccaaaggttagagttgaagggtttgattgtcttgacagggatagcagaaactgcagcatccctgccttggcttag

SEQ ID NO: 24 - DNA, 1623 bp, Arabidopsis thaliana
atgaaacttctgggtttggtcttcttgctgtttaatctgtttatgttttcgttttctcggaaacttttaaccgagagtggtggtggtctccacgacgaagctgctctgttgaagttgaagagtagtttcttggatccaaatggagttctgtctagctgggtttccgacagctcatcaaaccattgttcttggtacggtgtctcttgcaactctgattcgagagtcgtttctttaattctcagaggctgtgatgagcttgaaggtagtggtgttcttcatctcccagatttgtcttcttgttcttcaagtaaaagaagacttggtggtgtaatctctcctgttgttggagatttgtctgaaattagggttttatctctgtcttttaatgatcttagaggtgagattccaaaggagatttgggggttggagaaattagagattcttgatcttaaaggtaacaactttatcggtggaattagggttgttgataatgttgttcttaggaaacttatgagttttgaggatgaagatgaaattggtccaagctcagctgatgatgattctcctggtaaatctggattgtatccgattgagatagcttctattgtgtcagcttcagtgattgtctttgtgcttcttgttcttgtgatcttgttcatctacacgaggaaatggaaacgaaactctcaggttcaggtagatgagatcaaggagattaaagtgtttgttgacattggtattcctctgacgtatgagatcattgttagagctactggttactttagtaactctaactgtatcggtcacggcggtttcggttcgacttataaagcagaggtgtctccaacgaatgtgtttgctgttaaaagactctctgttgggaggtttcaaggtgatcaacagtttcatgctgagatctctgctcttgagatggttaggcatccgaatcttgttatgttaatcggttaccatgcgagcgaaaccgagatgtttcttatttacaactacttatctggaggaaaccttcaagatttcattaaagagagatcgaaagctgctattgagtggaaggtacttcacaagattgctcttgatgtagcgcgtgctctctcctatcttcacgaacagtgttctcctaaagtcttgcatagagatatcaaaccgagtaacatactcttggacaacaactacaacgcttatctatctgatttcggactctcgaaactcttgggaacttcgcagtctcatgtcacaactggtgtggctggaacattcggatatgtagctccagagtacgcaatgacatgccgagtctcggagaaagcagatgtttacagctatgggatagtcctcttggagctgatatcggacaaacgagctctggatccttctttctcatcgcatgagaacgggttcaacattgtctcgtgggctcatatgatgttgagtcaaggcaaagcgaaagaagtcttcaccacaggactatgggagactggtcctccagacgatttggtcgaggttctgcatttggcactcaaatgcaccgtcgatagcctctcgataaggccgacaatgaaacaagctgtaagactgctgaaacgaatccagccttctagattgtga

SEQ ID NO: 25 - DNA, 609 bp, Arabidopsis thaliana
atgtctgttgagttatgttcggtgaggcctttgtttggtggcgctatttccaccgtcttccctcaaagatttcaggatgtgagtaatatccgacaagttccagatcatcaggaagtgtttgtggatccttcaagagatgagagtttgatttttgagttgttggatttcaaggctgaggttggtgacattggcagtgcctcttggttccttaatgatcttgcgagtgagcaagatgctgaaggatttcagttgattgagcaatcagaggtcattgaggcgcctggactgtctttcagaaacatctctgctgttgcgacaactgctattggagagatggctatatccaaaggaagacagggaagagaagcacaaaacctagtgagagtatatgtggcaaatattcgtcttaagggagttgatacagatgtcttagtgactgcctatgaacctatcctgataaatcctctgagcgaaagcgcggatgctgtgggatctggtttagctgtcccagcttcacaatctggaaaaatgccaatgtgtgatatcattaaacaatcactctctacattcaaagtcaatgactggaatcttttcggttcctcagcttga

SEQ ID NO: 26 - DNA, 897 bp, Arabidopsis thaliana
atggcgactaatggatctgctagctcagcgcagctctctcagaaggaagctgatgtcaggatgatgtgtgccgctgaggttcatcttggaaccaagaattgcaattaccagatggagcgttacgtcttcaagagacgcaacgatggtatttacatcttcaaccttggcaaaacatgggaaaagctccagatggctgctagagttattgttgccattgagaacccacaggacatcatcgtccagtcagctaggccctatggacagagagctgtgttgaagtttgctcagtacactggagccaatgccattgctggaagacacactcctggtaccttcaccaatcagatgcagacatccttcagtgaaccaaggctgttgattcttactgacccaagaactgaccaccagcctatcaaggaaggtgctttgggaaacattccaatcattgctttctgtgacacagactctccaatgagatttgttgacattggtatcccagccaacaacaagggaaagcacagcattgggtgccttttctggcttctggctcgcatggtccttcagatgcgtggaaccattgctgctggacagaagtgggatgtcatggttgacctgttcttttacagggaacctgaggagactaagccagaggatgaagatgaagctggccctcaggcagaatatggtgcacttcctgctccagaatatggaatggtaggtggagaccaatggaccaccgctcagatccctgatgctgcatggccaggagaaggtcaggcaccaatctctgctgcacctgctgctgcttcttggagtgattccgctgctgcaccggcagatggtggatgggaagctgccgcgccaccctcaggggcaccagctgctggttgggagtaa

SEQ ID NO: 27 - DNA, 1179 bp, Arabidopsis thaliana
atggtggtcgatgtagagagccgaaccgcgagcgtgacaggagagaagatggcggcgcgtggctgtgatgcgtgcatgaagagatcacgtgctagttggtactgtccagccgatgacgctttcctatgccaaagctgcgacgcctcgatccactcggctaaccatttagcgaaacggcacgaacgtgtccggttacaatcatcttcgccgacggagacggcagacaaaacgacgtcggtatggtacgaaggattcaggagaaaggcgagaacgcctaggagcaagagttgtgcgtttgagaagttgttgcaaatcgagtcaaacgatcctcttgttccggagcttggtggagacgaagatgatggctttttctcgttctcctccgtagaagaaaccgaggagagtctgaattgttgcgtgcctgttttcgatcctttctcagacatgctgattgatgatataaacggcttttgcttagttcctgatgaagtcaataacactactactaatggagaattaggagaagtcgagaaggcaatcatggacgatgaaggttttatggggttcgtgccattggatatggatcttgaggatctcactatggacgtggagagtttacttgaggaagaacaactttgcttgggattcaaggaaccaaacgatgttggagtcatcaaagaagagaataaagtagggtttgagattaattgtaaggatttgaagagggtgaaagatgaagatgaagaagaagaagaagccaagtgtgaaaatggaggatcaaaggatagtgatagagaagcatcaaatgataaagatagaaagacaagtttgtttctgagattagattatggagctgtgattagtgcttgggataatcacggttcgccgtggaaaaccggaatcaaaccggagtgcatgttgggagggaacacgtgtctgcctcatgttgtgggtgggtacgagaaattgatgtcgagcgacggatcggtgacacgtcagcaagggagagacggaggaggatcggacggggagagagaggcgagggttttgaggtacaaggagaagcggaggacgaggttgttctcaaagaaaataagatatgaggttcggaaacttaacgctgagcagagacctcgaatcaaaggtcgtttcgtgaagaggacgtcacttttgacgtga

SEQ ID NO: 28 - DNA, 444 bp, Arabidopsis thaliana
atgggactacaaggtcagctctccgacgtgtcatcagattcgatcccactgatgctactggctctcctcgcaactttcttcagacacgtccggtctcttctcctcttcccttcttctgcccccgttgttgttgttacttcaaacctcagcgtcctcgccgaccagctcaacctaaatcgcctcttctcgtaccgctactccgacaacgcagcctctgactgcatcgtgtgtctgtctaaactcaagaccggagaagaagtgaggaagctagattgcagacacgtcttccataagcagtgtttggaaggctggcttcaacatctcaacttcaattgcccgctctgtagatctccattgctacctcatcatcatcagggacatggcagtgatgcgtcgatctcagccttccctcttcgctctacctctactgcatcatctcattga

SEQ ID NO: 29 - DNA, 1068 bp, Arabidopsis thaliana
atgtcaacggagagacgtgcttcgtcgaatccaatgaccaacgaagagaacgctatgttccttgatatattgcatgaagcaccattatttggtcacaggaaatctagaagccttgttggaagttacctctatatgcttctattggcaggttatgctattttagctgctggtgctccttggatgtttcaccgagtccaacagttgaccccttcattgctctgctgctgcgatgttgcgcttttggttgtcacaggtgtctttcaacaatactttgtttatcaagtccagaaaatacgtctccagggttattacagtttcagtcaaaagttgaagcatgttgttcgtctgccatttgcaatcgctgcatatgggactgctgcaatgcttcttgtgatagtgtggaggcctcaaatccacattctttctatttcttctttgcaacggatcatcatgttggttgaagcagtgggcgctggctttttcatgggtttatacatcggttatgtgcaccaatacaattccgtgaattcccggccagatgtcttgaagtcattatattctcctcttcagccgtcaagttctatggaaggtttgaggtattatgaaggccggctttctgatcaacaaacggctttgttacaatatcaacgcgaaaatctccattttctaagcgaggagattctgtgcttgcaagagaaacttagcaaatatgaacaatctgatgatggaagcacacctcaggttgatctcgcacatcttttagctgctcgagatcaagagctgaggacactttcagctgagatgaatcagcttcagtctgagctacggcttgctcgttctttaatagccgagagagatgcagaggtgcagcgtgtcaacagtaccaacaaccagtatatcgaagaaaacgaaagactgagggcaattttgagtgaatggagcatgcgggcagcgaatcttgagagagctttggaagtggaacggatgtcgaactcagaactacagaaggaagtagcaagcacgcgtagaaagcagatgcttgagacaacaacgtctgagcaaccttaa

SEQ ID NO: 30 - DNA, 645 bp, Arabidopsis thaliana
atgtgggcaccagatatctatgagggttcacccaccccggttacagcattcctttctattgcgcctaaaatctctatttctgctaatattttacgtgtttctatttatggttcctatggagctacattgcaacaaatcttctttttctgcagcattgcttctatgatcttaggagcactggccgccatggcccaaacgaaagtcaaaagacctctagctcatagttcaattggacatgtaggttatattcgtactggtttctcatgtggaaccatagaaggaattcaatcactactaattggtatctttatttatgcattaatgacgatggatgcattcgccatagtttcagcattacggcaaacccgtgtcaaatatatagcggatttgggcgctctagccaaaacgaatcctatttcggctattaccttctccattactatgttctcatacgcaggaatacccccgttagccggcttttgtagcaaattctatttgttcttcgccgctttgggttgtggggcttactttctagccccagtgggagtagtgactagcgttataggtcgttgggcggccggaaggttgccacgaataagtaagtttggaggaccgaaggcagttctccgtgcaccggacacgtag

SEQ ID NO: 31 - DNA, 1224 bp, Arabidopsis thaliana
atggtggattggtctacactaccgaaggatcttttagacctaatttcaaaatctctagaatcttccttcgatctcatccaattccgttccgtttgttcttcatggcgatccgccgccgagccgaaaagtcctcttccaacacatcatctcccgatcctccccgataacggggggagtctcttccctgattccgccgttggtttccgtctctcgcagcggagtatcttacttatcaagcctcatgaaccgtgtatcgaatcggattcgtttggatggttgatcaaagtcgaggaagatcttaatgttcctcgtaaggtgactcttttagatccgttatgtgatacaagaaactcaattcctgagaatttccctcgtgttctcgatatgtccaagtttaaggttcgagaattgggtcgtgaattcaagcttcattatttcaatactgttggtgatattgtagagagtttgtatttggagaaagctgttgttaagtatctagattgtgatggagattataaatttgtgttgcttacgattcatgtttcggggaagttagctgtgtttaggtcttgggatcgagcatggactgtgattaatgacatgccttctccttatgatgatgtgatgttgttcgatggacgtttctttgcggttgataacaacgggaggactgtggttgtggattacagttccttgaagttgacgttggttgcgagtcctgtgtttggtggtgataagaagtttttgattgaatcttgtggtgaaatgttgcttgttgatatgtacttgagcttagaggcagtggaaggggatcctggatttgttgaggagattttcgagcatcctgcgttttatatgaatgagagaacagtcaaatttaaagtgtatagatttgtggaaagagaggagagttgggttgatgtttacgatcttgaggataagatgttgttccttggtgatgattccaccttttctgcttcagcttccgatatattacctctatgtgatggaagctctgtgttcttcaacggtaatgtcttcaatggggaagacttgggtgcgatgcaagatcgagatttgggagtgtttgacttcaggagtgggaaaatagagctagtgcaaaaactccctgaatatgctaagctgttttggcctccacctccttggataacttctcatgcgcgtgctgaagatcatattggagaaacatcatcccaatcttga

SEQ ID NO: 32 - DNA, 213 bp, Arabidopsis thaliana
atgacggtggacgagtggagactcttggacgtctccacggcgtttggcagcggagaaaactccgtcccagatttcggagaaagcgcggatgatgatgccgtggtggtatggctcgttaagggagaggaagcagtggagaagctctctgagatcgtttttggagtaaatctcgttctcgagaatcatctgaagcatggactgtcggaaatctag

SEQ ID NO: 33 - DNA, 213 bp, Arabidopsis thaliana; identical to SEQ ID NO: 32

SEQ ID NO: 34 - DNA, 204 bp, Arabidopsis thaliana
atgtttgtgattggagtggtgatggtgctattggcggttcttccagccgttctgccgccgcttccgccgccgccgatgatattgatgggaattccggtggtgctgatgctaatgcttatttacttagccatttattatccacctcatcaagctcattttctctcttcatcttcctttgacactacttctaggcatgtaatgtga

SEQ ID NO: 35 - DNA, 873 bp, Arabidopsis thaliana
atggcgttgagaatcaggaaggcgacgacgacacttctcttctccggtgggattactcatggaacggatcggatcgcgagaaccggagcattgctcagccgttggatctcctctgcttcgtcatcttccgctgttgtagcggatgatgaatctagtgggatttacggattgggaagtgtgttgaaagagtatgaagattataggagatctctctatggtgagatcactcataaggctttgcttgttgatgctgttggtactctccttgttcccgctcaacctactgctcagatatataagaatattggagagaagtacggagtggagtactcggaggctgagatacttactagatacagaagagcttatcagaaaccatggggtggatctcatcttagatatgtaaacgatgcaagacctttctggcagtatatagtgactgcatcaacaggctgctcggattcacagtactttgaagagctttacagctattttactacagaacaggcgtggaagttatgtgatccagatgcagggaaagtgtttaaggctattaaagaagcgggtgtaaaagttgcaatagtctccaacttcgatactcggttaagacctctcctacgtgcattgagatgtgaagattggtttgatgctgtagctgtttcagcagaagttgaagcggaaaaaccaaacccgactatcttcttaaaagcttgtgagttattagaagtgaatcccgaggatgcggttcatgtaggagatgaccgtaggaatgatgtatggggagctagagacgcaggctgtgacgcttggctctggggaagtgaagttacgtcatttaaacaggttgctcaacggataggagtgaaggtctga

SEQ ID NO: 36 - DNA, 900 bp, Arabidopsis thaliana
atgatggagatagatttgcagaagacttttacctggaagatagaaaatttctccggaaggaaatttccaataacgtctactgtgttctcaagcggtggctgcgaatgctatgttctaattcgtcccaagggagatggctttgaagattacttatctctgtatctatgcgttgggaaccctaaatcattgcaacctggatggaaaaggcgagccagtttgcacttcattgtattgaatcaatcaggcaaagaggtccatagaacatctgaaagatatggcttgtttggtcctgagatccctggctggggttttcgaacggcgttgcctcttaccaagttacaagatagagagttgttggagaacaacactctcttcattgaagtctacattaaagttactgaagttgttcatgaaggggatgaaacaaggaaggatatgttagatttcaaaggtttcaatgttctttcttctcaaattgcttcggtgagcccgatattcgctaagtacccaaaatttgcggatgatatcaaaccaacaagcaaagcggtgaagacagtatacctgaagattctcctcggccttatcaagacagtaaacaagcctccagagatcttttcagagactgaactaatcaaggcttatagcagcttaattgatctaatggaagtgggctttagggtgaagtggttgaagtcaaagcttgatgagatttccttggcgaggaagaaaaaagttgatgctgatgcggctcgggtccaagagctcgagggaaaggtcaagaatcaagttgaactggacaaggagaaaaccaagtctcatgttgaacctaaaatgttatcgttcaaggattatgcttcccctgtgagtccttggattccacgaaggaagagatccgattaa

SEQ ID NO: 37 - DNA, 990 bp, Arabidopsis thaliana
atggaagctcctccaccttcaagcgatccatacaagttcctcaacattacacttaactcagatggatctctcaccagacaccgtgatttccccaaactgcccccaacagagcaatccaaagacataccattaaaccaaaccaacaataccttcatccgaatcttcaagccacggaatattccgccggaatccaaacttccgatcctcgtttactttcacggcggtggatttatcctctacagcgccgcttcagctcctttccatgaatcttgcaccaaaatggctgatcgtcttcaaactataatcctctccgtcgaataccgtctagctcccgaacaccgtctcccggcggcgtacgaagacgccgtcgaagctatcttatggctccgtgatcaagctcgtgggccaatcaacggtggtgattgcgacacgtggttaaaagacggtgtcgatttctcgaaatgctacgtcatgggttcaagctctggaggaaatattgtctacaacgtggcgttgcgtgtagttgacacagatctttctcctgttaagatccaagggctgataatgaaccaagctttcttcggtggcgttgagccgtcggattctgagtcacggcttaaagacgataagatctgtccgttaccagctactcacttgttgtggtcactttgtttaccggacggtgtagatcgtgaccacgtgtacagtaatccaattaagagcagtgggcctcaggaaaaagataagatgggacgttttccgtcgactcttatcaacggttacggtggggatcctttagtggatcgtcagagacacgtggcggagatgttaaagggacgtggagttcacgtggagacgaggtttgataaagatgggtttcatgcttgtgagttgtttgatgggaacaaagctaaggccctgtacgaaaccgttgaggcctttatgaagagttgttcatcaactggcccatcgtccaactccaacatgtag

SEQ ID NO: 38 - DNA, 558 bp, Arabidopsis thaliana
atgggtttaattcctcaaccacaagaatcgatccaagaatctcattactacacacataaactcttcctcactgcaaactacgtcctcctcggtgcatcgtcaagctgcatcttcctcactctctctctccgtctaatcccttcactctgcggtttcttcctcatcctccttcacgccaccacgatcgcagccgccgtctcaggctgtgcagccgcatcttatggtaagaaccggtggtacgcagctcacatgatcgcaactgtccttaccgccattttccaaggctcagtctctgttctcatctttaccaacacttcgaatttcctcgagagccttaactcttacgtccgtgagaaagaagcgtctatgatcttgaaactagctggtgggctctgtgttgtaatcttttgccttgagtggatcgttcttgttctcgcctttttcttgaagtactacgcttatgtcgatggtgataacaatggagttgctatgaaaaggactggtaaggttcagagtgaagagactctcaaaaattccccatgggcgttccaagtttga

SEQ ID NO: 39 - DNA, 1500 bp, Arabidopsis thaliana
atgggtgagaaaacaaactcacgttatctcggtgtaatcatcactcgaaaatctataattttcttgttcatatcaatcatcaccgtcctttcttggttttttatcttttcttccacaaaccctaaccgagttctcgatcacatctcagtatcagaatccacagatgtacctctcatcatcatcaagaactcaaacagttctccacaaaacaacgcaccaaaaccccaaaacagagaaggagcagaaacagaggaacccattaaagaaaacagaggaggaacaaaaacagagtcatccatgaatcaaaacagaggcgaaaccctccggtgtatccaaagggtttctccttctccaaggccattgaaagtctacatgtatgatatgagtccagagtttcattttgggttattgggttggaaaccagagagaaacggtgtcgtttggcctgatatcagagtcaatgttcctcaccatccaggtggtcttaacttgcagcacagtgttgagtattggctcacattagatcttttgttctctgagcttccagaagattctagaagctctcgggccgcgatacgtgtaaagaactcgagcgaagctgatgtcgtgttcgtgcccttcttctcttcattgagctataaccgattctctaaggttaaccaaaagcagaagaagagccaggacaaagagttgcaggaaaatgtggtgaaatacgtaacgtcccaaaaagagtggaagacctcaggagggaaggatcatgtgatcatggcgcatcatccgaatagtatgtcgacggcaaggcataagctatttccggcgatgtttgtggtcgctgactttggtagatactcgccacatgttgccaatgttgacaaagacattgtggctccatacaaacaccttgttccatcgtatgttaatgacacatcgggctttgatggccgtccgatcttgctctacttccaaggagccatctaccgcaaagctggtggatttgtgagacaagagctatataatcttctcaaagaagaaaaagacgtccacttctctttcggaagcgtaaggaaccacggcatatctaaagccggcgaaggaatgagatcgtccaagttctgtctcaacatagccggggatacaccatcctcgaatcgcctcttcgacgccatagctagtcactgtatacccgtgatcattagcgatgacatcgagttaccatatgaggatgtcctcaactacaatgagttctgtctctttgtcagatcatcagacgctttaaagaaagggtttctgatgggtcttgtcaggagtattggcagagaagagtataataagatgtggcttcggttgaaggaagtggagaggtatttcgatttgcgttttccggtgaaggatgacgagggagattatgcagttcagatgatttggaaagctgttgccaggaaagctcctttggtgaagatgaaggttcacagatttcagaggtttacaaggcctttttag

SEQ ID NO: 40 - DNA, 951 bp, Arabidopsis thaliana
atggctacttttcataccgttagagatgcggtgaagctctttgacgctggtatttctggaggaaaacatctcaacaaaggacaagaagagggagtgttggtggaggagacaaatctctgtctctggaataaagaggttaacaagttgaaagaaaagataaagaatgctgtgaagaccaagattgaggctttgttagaactggaggaagctaagaaaacggttgagcaactcagtcaggagttgggaattaagcggaacatgattaatgatgagaaagatttagatttgagtagtagtgtaagagttgtgacttcagagctaggtgttgctaaggaatcgattcatagagtagctgaagaggagagtgagctgtgtatgttaatggagtctcttaagctcgagcttcaaaacgtggagaaagcacattcagagcttaaagagattgagcaaagagagagggatcatcaagccattgaagatctgaagaaggaaacaaaagatgcaaaaacccaactctcgttgttagaagaagagctcaagattgctgtttttgaagctcaagaagcaaaagatgcagaggaacacgccagggaacggctaaatgttgcagttttagaatctgatttcagatcattagctgtggtgaaagaaagtgctgctgaagaattaactgagacagaagctttaagagcttgcagagatgaaacactcaagacattagagatgagtgagagagaaattgaagatataaaagctgcaacacaagatgctttgaagaaagctgagatggctcaagaagctacaattgtggtggatgttgagctgaaacgacggcgtaaagcagcgagtaggatcttggcagaatccaaaatgtgtgccaaatctaccaaggaagtgctcaagtcaaaaccaagatcatcgtcaaaagaaggttgcctggtcaagtgttag

SEQ ID NO: 41 - DNA, 984 bp, Arabidopsis thaliana
atggctacggtcactgagatgcccactgatgttgttgttgtcgacgatgttaaggaagttagtaccaaaagcgaaaagatcatcgatgagggaattgagaagagctcgatcacggattctaaaaccgaaactgaatctcggcttgatatgcacaagcttgtggctatgttcaagaaactgaatcctttggccaaggagtttttcccttcttactacgatccgaagaagaacaatcaggtagctaaggctaaccaatttctgccggctgacgattttgagaccaccaagaagcaatctggtgaagaatttgatcttgatgccaagaaggatgacaatacccgcaagagaagaaactatagccaagggagaaggaggttaactggaagaatttctaaggctcaaagagaggatagtattagaagaacagtttatgtttctgacattgaccagagtgtgactgaggagggtcttgctggcttgtttagtaactgtggacaagttgttgactgtagaatttgtggcgatccacattcggttcttcgatttgcgtttgttgagtttgctgatgaccagggcgcacatgaagctttaagccttggtggaacaatgctcgggttctacccggtgagggtcttaccctcaaaaactgccatcctaccagtgaatcccacatttcttccaaggtcagaagatgaaagggagatgtgcacaaggacaatctattgcaccaacatcgacaagaaagtttctcaagctgatgtgagaaacttctttgaatctgcatgtggtgaggtaactcgtctgaggcttcttggcgatcaattgcattcaactcgcatagcttttgttgaatttgctctggcagatagtgcacttagcgcgctcaattgcagcggaatggtcgttggatcacaaccgataagggtaagtccatcaaagacaccagtgaggccaagaatcactcgaccaccatcgacaaactag

SEQ ID NO: 42 - DNA, 2019 bp, Arabidopsis thaliana
atgatgcctcctaatgagcaagaatctagctttccgaaaacaccgagcgcaaaccgacacgaaactagtccggttcaagaaaaccggtttagctctccaagtcatgtaaacccatgccttgacgacgataacgaccacgacggtccgagtcaccaatcaagacaatcttctgttctacgtcaatctttacgtcctataatcctcaagtttgaggagttgacgtacagtatcaaatcacaaaccgggaaaggaagctattggttcggttcacaagaaccaaaaccgaaccggttagtcctcaaatgtgtaagtggtatagtcaaaccaggggagttactagcaatgcttggtccatcagggagtggcaaaacaacgctagtaacggcgctagccggccgtttacaagggaagttatcaggaaccgttagctataacggagagccgtttacaagctcagttaaacggaaaacggggttcgttacacaagacgatgttctctacccacacttaacggtcatggagacgctaacgtacacggctttgctccgtttaccaaaagagttgacccggaaagagaaactagagcaggtggagatggtggtttcggatcttgggttgacccggtgttgtaacagtgttatcggaggcgggttgatccgaggaatttcgggtggggaaaggaaacgggtaagtattggacaagaaatgctagtgaatccgagtttgttgcttcttgatgagccaacgtcggggcttgattctaccacggcggctcgtatagtcgccaccttgagatcgctagcacgtggtggtcggacggtggtgacgacgattcatcagccgtcgagtaggctttatcggatgttcgataaagtgttggttttatcggaagggtgtcctatttatagtggagattcgggtcgggtcatggaatattttggttcgattgggtatcaacccggatccagtttcgttaacccggctgatttcgtgcttgatcttgctaacggaattacttcggatacaaaacaatatgatcaaatcgaaactaatggaagattagatcggcttgaagaacaaaactcagtgaaacaatcgttaatatcgtcatacaaaaagaatttgtatccacctttgaaagaagaagtgtctagaacgtttccacaagatcaaacgaacgctagattgagaaaaaaggcaataacaaatcgatggccaacgagttggtggatgcaattctcagttctactgaaacgaggtttaaaagagagaagtcacgaatcattttcaggactcagaatatttatggtcatgtcagtttctttactttcaggcctcttgtggtggcattctcgcgttgctcatttacaagatcaggtgggtttattgttcttcttctcgatattttggggattcttccctctctttaacgccatttttacattccctcaagaacgaccaatgcttataaaagagcgatcctcgggaatctacaggctctcctcttactatatagcaagaacagtcggcgatttaccaatggaactcattcttccaacgatatttgtcacaatcacatattggatgggaggtcttaagccatctttaaccacattcatcatgacccttatgatcgttctctacaatgttctagtagctcaaggcgtagggttagctctaggagcaatcttgatggacgcaaagaaagccgcgacattgtcttcggtgttaatgctagtgttcttactagccggaggatactatattcaacatattccgggtttcatcgcgtggttgaagtatgtttcgtttagccattattgctataagcttcttgttggggttcaatacacatgggatgaggtttatgaatgtgggtcagggttgcattgtagtgttatggattacgaagggattaagaatttgagaatcgggaatatgatgtgggatgttttggctcttgccgttatgttgcttctttatagggttttagcttacttagctctaaggaacttgtga

SEQ ID NO: 43 - DNA, 720 bp, Arabidopsis thaliana
atgatgatgtactgtcccaacctcacggcttctctaacaatcccttcatatttaccattttgccactacactagacaatttcgtccttctcatttccgatcatctgataaaaacccgaatctcgtttctatcatccgagcaaaacccagaatttctcattcgcttaggtgctttgtatcatcttcaatggcgactcctcctccgacgcagagcagcgaaaccaaaccttactctgttctttttgtctgtctcggaaacatttgtcgcagcccagcggctgaaggtgtctttagagatatcgtgaagaagagaggtctcgattccaaattcaacattgattccgctggaacaattgattatcacgaggggaatatggcggatccaagaatgagaagtgctgcgaaacgtcgcgggattgagataacatcactatccagaccgatcaaggcatctgatttcagagaatttgatctcattcttgcaatggatgaccagaacaaagaggatatattgaaggcttataatgtgtggaaagccagagggaatttcccgcccgatgcagataagaaggttaagctaatgtgttcttattgcaagaaacacaatgacaagtttgttcctgatccatattatggtggagcccaaggttttgagaaggtactggacttgcttgaagatgcttgtgagtctttgctggatagtatcactgcgcaaagttga

SEQ ID NO: 44 - DNA, 645 bp, Arabidopsis thaliana
atgactgagaaacaacatgatcaagcttcaatgcgagaagaagcagtcctacctgaagtagtcgtggctcactacgaatgcgaaacttggggtcttccacgatctctaagttcttacatctcttctttcataacccacaaattcaatactcaattcccaaacgttacactcgccgtggcttacactcatgttggattgattttgatcagctctggcaacaaattactaacttactatgtggctaatccgatctcaagacaatgtgtcgaaatccctcagcctcctccaacagttggttattttttaacctctgggcttgtcacaaaacttgaggatcacgtcgttttaggttacaaagttgttttgatggatacaagtaacttggacgatgtcataagtttactgatatattcatccgagacagggttatggagtttcaaaaccctccaatctcatctcactttgtctggtctgatagattacaaccctgttagcttgtatggaaacctttactggataggctacaacaacgactatggagaggttgttgtgttccatgatttctacgcgactggcacggaatctgatcgatgccaagttacacctttccctgacggtggaacgaaaccaccaaatttaaaatga

SEQ ID NO: 45 - DNA, 351 bp, Arabidopsis thaliana
atgcaagattcaaagattccacctttctctgaagcaaaaagaatgaagattcctactccaaaacaacccttgactcaactaccaccacgtatcgggaaaaaagtttcaaatcggagcaaatcgaaccaggttcatgcgatttcacatcaacttgagatgtctccaaattcagattcatctccaggaaacgagtacagagcactgagacgcaagtatttgctgctagaggaagatagtttcgcgttggagagagagttaaaggaagcagaggatgaggttaaagcacttgaagatgagaaacttgagctcttggacaaactcgttgttatggaaggtttagttgatccttga

SEQ ID NO: 46 - DNA, 1077 bp, Arabidopsis thaliana
atggccaaggaattagcagagaaagctaaagaagcttttctagatgatgacttcgatgttgctgttgacttatactccaaagccattgacttggatcccaattgcgccgccttcttcgccgatcgtgctcaggccaacatcaaaatcgataacttcactgaagctgttgtagatgcgaacaaagccattgagttggagccaacgttggcaaaagcctatctcagaaagggcactgcttgtatgaagctagaagaatatagtactgctaaagcagccctggaaaagggagcttctgttgcaccgaatgaaccaaagtttaagaagatgatagatgaatgcgatcttcgtattgcagaagaagagaaagatttggttcagccgatgccaccgagtttgccttcaagctctacaacaccactagcaacggaagctgatgctcctcctgttccaattcctgcagcacctgccaaaccgatgttcaggcacgagttctaccagaaaccagaagaagcggtggtgacaattttcgccaaaaaagtacctaaggagaacgtaactgtcgagtttggtgagcagattctgagtgttgtcattgatgttgctggagaggaagcttatcatctccagccgagattgttcgggaagataataccagagaagtgcagatttgaagtattgtcgaccaaagttgagatccgtcttgcgaaagcagagataatcacctgggcctcccttgaatatggtaaagggcaaagtgttttgcccaaacccaatgtctcatcagcgctgtcgcagagaccagtgtacccatcttctaagccagcaaaagactgggacaagttggaagctgaagtgaagaaacaggagaaggatgagaagcttgatggagatgcagctatgaacaaatttttcagcgacatatactcgagtgcagatgaagacatgaggcgggcaatgaacaaatcatttgcagagtcgaatgggacggtactgtcgacaaactggaaagaagttgggactaagaaagtggagagcactccaccagatggcatggagctcaagaagtgggagtattga

SEQ ID NO: 47 - DNA, 492 bp, Arabidopsis thaliana
atgaaatattgcaaagtggaattacgcttcatcaaccaaaggaaactctctccatcacaaccaaactcagttctcgttttcatcgaaaccaaatctgaagagatctttgtaaacccaacaaccggtcaccaaaccagccggtccactccggcttcaccatcttttttcgatactatcaatctctgtagttctagtcaccaccacatccgatcacttctccgtagtcggttcgttagctaccattttttgtgtgatatcttagccccagagatcgcgacggaggcaatcaacttaggttttggacgaaacggctttaccttcaccgtggtcgtcacagttactaaccggaccgtctccgttacttcaaacgacacagaaatcattgagaatggttctactagagaggataaaagcagaggaattaaagagttcgaacatggaaacagagtcgtgttccatctgtttccacgatctctccagtccgaaacctag

SEQ ID NO: 48 - DNA, 834 bp, Arabidopsis thaliana
atgccgatcgggtgggtcaaatccttacattgcaaatcaaaagcattcgacgatgtctatcatcatcactccaacaaaggtaaactcttattgccaagttacagctgcagaaaaaacgttagagacgttgtcaatacacaacccggaaccgttaagaaaaacccaaaaccggacccgagtttaagacgtttatgctcttctcgtcgacccgaattagactccaattctcatcacccgacccgacgaagtgtatcagctcgagcttcctcggaatctgtattgcccgtattgaccgatcttcctgatggtcatccgtcaagaaacgtcgtggagattatattccaatctagttggagctccgatgagtttccgggtcgggttgaaatgatttttaaagttgaaaacgggtcaaaagctgtgacccggtttgaggaatatagagaagctgtgaaatcgcgatcgtgttcgaaagttgattctgatagagttgacggcagcgcgtgtgatgaaaacgcgcggtgctccgctgatgggaatgagatgatgaggttttttccgttgggtccgattccgggagggataaacggcggcgcgtggggttttcccggagggaaaggagcggcggtttgtacgttttccggtagcggagaagcgcacgcgagcactggcggcggaggagggaggagagcgatgttgatttgtagagtgattgcgggtcgggttgcgaagaaaggtgaattcgggtcggattcggtagcgggtcgagctggtgagttgattgtctttgatgctcgcgcggtgttgccttgtttcttaatctttttcagattgtaa

SEQ ID NO: 49 - DNA, 216 bp, Arabidopsis thaliana
atgactcgtggaagtcagagagagcgtgaccgtgaaagagctgccgctcgtgctggtggaaagggtaagaatggtgacgatggtttgacgccggagcaacgccgtgaaagagatgggaaagcattgcaagagaaagcggctaagaaagctgctcaagctgcaggtgcgagttctggtggtgcagctggaggaaaaggagctgctgctaagaagtga

SEQ ID NO: 50 - DNA, 2412 bp, Arabidopsis thaliana
atggaggaatatttgaatcttatgttgaaagcgagagagattcttgttagtgaaagccatgaagaagtagcgatggtcatcgatcatctctttaagcgtcaagactccgaagagtataaaacatcgcgtgcgctgtacgacatctgcgtttcttgtaacccaggttgcttaaccctaaagcttcttaaagtctatcaatcttcttccagtggcattctcagactccgatcaatctctcaactctctgagaccctcacctatctgaaaaatcaaatcgtattttccaaattctctctcgactctctctatgaaatcaaaccccttttgattttatgccttacaatgcaagaaaccaaagaatctgacatcaagatcctcaggaaaatcgtgtcttttgtaacttacaatgtcgtggagttgcataaagacaaatgggacgagctcggtgattgtatcttatccctagcgagtagcaaagaacctgtcaaggcttttcacgtcttcatcgatctgccaccagtctacaagagtttcatcggcaagtttttggacaaaattttagaggaagctagtaatgtctttctttatccttatagagttgaagattggagcttggctttacaaacttttgttaaaatgtggattcagcttgagaaaacaggggtgacagtagagttactaatggcgttgatggagatttggatttcctctgttgtgaattcagtaaagaagctagtggagatgaaaaaagaacagtttttggtacgagggcttgaagatttcgagagtttcttctcaggagacatgaatctgtatcattacactaaagaccaattccattttgtgttggcttccatgaacgagatcgaaggagtagtcggaacagagacaaaggagattgtgaggaagatcaaaatgttggtgacagaaccatatgatgatcttaagaatcgtagagaagagtttgaacgtggctggtatgacattttgaaggatttatcatcactggaagtgttaaagattcttgcgtcctctgaacttgaagataggtccaaagagatagcaatcagacgactcaatgtcttactctctgatcacacttcaaagaaagtgcagatagacatttcagagatgagacaactccaaccattgctcatctcttgcttaaaggaagaaggactttcctttaacagtatgttcaaagtcctaggtgaggtggtgaaccatgttgcatatgagatgttgatctaccaagaggagacatggtacgagctacgagattatattgcatcgagtaaaacagagtttcatagagcggtttatatcttccagtgcttaacaatggcacttattgacgacgattttgtgattcctgtgatggagaatcttttcctagagataatcacaaggctagacccaccaagagagttgttggtagataacagtagctgggtcttggcgtttatgggtggcttttgtttagcaattcacttgatagagatgtcaagtaaagctgaatccgttaaggagattgcacataagatgatagattctataagagagctaatggaaagagaaatggaagttgggcttgtgaagagaggtttcagagatgtggaaagcatcgtgaagaaacaattggaatggtataccatgggaggtcacggtggtttgaatattcttccacagaagaggtggaacgtttacaacttcgacaatcgagaaaaagtccgaaaggaggaagaagctgccgctagagaagagcagatcaaacgcgaggaagctagaaaacgagatgctgaatctcgtctcgaagtgcttcgtaacgtccgtggcttggcgcctctcaaacgagcgtctccggaggcagagaagggtaaggatgaagcggtggtggcggcggctgttgttaaatcgactgctgttgttgtggagagtgttgaatcggaggagcctaagacgggtcatattaatctgttcgaagggattaggatttttgatccgattgagatcaagaagaatgataagcctgcggatgaggaagatcagagaaggaagaagatgaggaaagaagcggctgcaacggcgagagcctctgcgaaagatgctgctgcgagagctggtgatcctgatgaggagaagtatagattgggatatggagttgctggtaaaggtgtgaagcgtccttggtaccttgagaaacgtaacgatgaaaatgatagtgttcgaggtgaggatgatgatggtggatgtggtggttatgaagctaagaagaagaagatgagtgggaagaagagcttaaaggagttgagggaagaaaggttgaagagggagagggttgagaaggaaagagagagagcccttttcatgaaacagagccagagagccggtggtttttcccggaggcggtga

SEQ ID NO: 51 - DNA, 624 bp, Arabidopsis thaliana
atgggtggaggaagcagatttcaagaaccagtgaggatgagccgtaggaaacaagtaacaaaagagaaggaagaagatgaaaacttcaaatctccaaatcttgaagcagagagacgtagaagagagaagcttcattgtcggcttatggctctgcgatctcatgtccccattgtcaccaacatgactaaagcaagtattgttgaagatgcgattacttacataggagagcttcaaaacaatgttaagaatctcttagagacatttcatgaaatggaagaagctcctcctgagattgatgaagaacaaacggatccaatgataaaacctgaagttgaaactagtgatcttaacgaagagatgaagaaactcggaatcgaggagaatgtgcaattgtgtaagattggggagaggaagttttggttaaagatcataacagagaagagagatgggatctttactaaattcatggaggttatgagatttctcggattcgagattatcgatattagtctaacaacttcaaatggagcaattcttattagtgcctctgttcagacacaggaactctgtgatgttgaacagacaaaagattttcttttggaagttatgagaagcaatccataa

SEQ ID NO: 52 - DNA, 456 bp, Arabidopsis thaliana
atggcgacgtcgggaacgtacgtgacggaagttccgctaaaaggatcggccgagaaatactacaagaggtggaagaacgagaaccatgtcttccctgatgctatcggccaccacatccaaaatgttaccgttcacgaaggcgaacatgactctcacgggtctatcaggagttggaactacacatgggatggaaaggaggaggtgttcaaggagagaagagagatagacgatgagaccaaaacgttgacgttaagaggacttgagggtcacgtgatggagcagctcaaagtgtacgacgtcgtctaccaattcattcccaaatctgaggatacctgcatcggcaaaatcactttaatatgggagaagcgcaacgatgattccccagaaccaagcgggtacatgaaattcgtcaagagcttggttgctgacatgggaaaccacgttagcaaaacttaa

SEQ ID NO: 53 - DNA, 714 bp, Arabidopsis thaliana
atgagctcccaaatctgcagatctgcttctagagcagccaggtctcttctttcttcagccaagaatgctcgtttcttctccgaaggccgagccattggtgcagcaagtgtggtgcatgcgactggaaaagtccctcagtatgcatccaactttggaaaatcgggttctggcttcgtctctaatagctggatcaccggactccttgctcttcctgctgcagccttcatgctccaagatcaggaagcacttgctgcagagatggaacgcactttcatcgctatcaaacctgatggagtgcagcgaggactgatatcagaaatcattacacggttcgaacgcaaaggatacaagcttgttggcattaaagtcatggttccttcaaagggtttcgcgcagaagcattaccatgatctaaaggagagacctttcttcaacggcttgtgtaacttccttagctcaggccctgttgttgccatggtatgggaaggtgaaggagtgattagatacggacgtaaactgattggagccactgatcctcagaaatcagaacctggaactatccgaggcgatctcgctgttgttgttggaaggaacattatacatggaagcgatggaccagagacagctaaagacgagatcagcttgtggtttaagcctgaagaactcgtttcttacactagtaacgctgagaagtggatctacggccagaactga

SEQ ID NO: 54 - DNA, 1305 bp, Arabidopsis thaliana
atggaggaagtatctccggcgatcgcaggtcctttcaggccattctccgaaacccagatggatttcaccgggatcagattgggtaaaggttactgcaataaccaatactcaaatcaagattccgagaacggagatctaatggtttcgttaccggagacttcatcatgctctgtttctgggtcacatggttctgaatctaggaaagttttgatttctcggatcaattctcctaatttaaacatgaaggaatcagcagctgctgatatagtcgtcgttgatatctccgccggagatgagatcaacggctcagatattactagcgagaagaagatgatcagcagaacagagagtaggagtttgtttgaattcaagagtgtgcctttgtatggttttacttcgatttgtggaagaagacctgagatggaagatgctgtttcgactataccaagattccttcaatcttcctctggttcgatgttagatggtcggtttgatcctcaatccgccgctcatttcttcggtgtttacgacggccatggcggttctcaggtagcgaactattgtagagagaggatgcatttggctttggcggaggagatagctaaggagaaaccgatgctctgcgatggtgatacgtggctggagaagtggaagaaagctcttttcaactcgttcctgagagttgactcggagattgagtcagttgcgccggagacggttgggtcaacgtcggtggttgccgttgttttcccgtctcacatcttcgtcgctaactgcggtgactctagagccgttctttgccgcggcaaaactgcacttccattatccgttgaccataaaccggatagagaagatgaagctgcgaggattgaagccgcaggagggaaagtgattcagtggaatggagctcgtgttttcggtgttctcgccatgtcgagatccattggcgatagatacttgaaaccatccatcattcctgatccggaagtgacggctgtgaagagagtaaaagaagatgattgtctgattttggcgagtgacggggtttgggatgtaatgacggatgaagaagcgtgtgagatggcaaggaagcggattctcttgtggcacaagaaaaacgcggtggctggggatgcatcgttgctcgcggatgagcggagaaaggaagggaaagatcctgcggcgatgtccgcggctgagtatttgtcaaagctggcgatacagagaggaagcaaagacaacataagtgtggtggtggttgatttgaagcctcggaggaaactcaagagcaaacccttgaactga

SEQ ID NO: 55 - DNA, 1065 bp, Arabidopsis thaliana
atggaattgcaaggagaggaaagcaaaacggcgacgtattgcgtgacgggtgcaagtggatacatcggttcttggttggttaagtctcttctccaaagaggttacacagtccatgccactctcagagatcttgcaaaatctgaatactttcaatctaaatggaaggaaaatgaacggctcagattattccgagcggatcttcgagatgacggcagctttgacgacgccgttaagggttgtgacggcgtcttccatgtcgccgcttccatggagtttgatatctcatcagatcacgttaatctcgagagttatgtccagagcaaagtcatagaaccggcgctaaaaggcgtacggaatgtacttagttcttgtctaaagtcaaagtcagtcaaaagagttgtcttcacatcatccatcagcactctcactgctaaagatgagaatgaacggatgagatctttcgtggatgaaacatgcaaggctcatgttgatcatgtccttaaaacacaagcaagtggatggatttatgtattatcgaagctcgtatcagaggaagaagcatttcggtatgcgaaagagagaggaatggatcttgtttcagtcattacaacaactgtttcaggtccattccttactccatttgtcccatcaagcgttcaagttctcttgtctccaattacaggtgactcaaagttgtttgcgatattatcagctgtgaacaaaagaatgggttcgattgctttagtacacattgaagatatttgcagggctcatctgtttttgatggaacaaccaaaggctaaaggtcaatatatatgttgtgttgacaatattgatatgcatgagttgatgcttcatcacttctctaaggactatctttgtaaagttcaaaaggtaaatgaagacgaggaagagagagaatgtatgaagcctataatttcttcaaagaagttaagagaattggggtttgagtacaaatatggtattgaagaaattgttgatcaaaccattgatgcttctatcaagattaagttccctaccttgaaccacaaactcaggcagtga

SEQ ID NO: 56 - DNA, 945 bp, Arabidopsis thaliana
atgggtgttagagagaaagatccgttagcccagttgagtttgccaccaggttttagattttatccgacagatgaagagcttcttgttcagtatctatgtcggaaagttgcaggctatcatttctctctccaggtcatcggagacatcgatctctacaagttcgatccttgggatttgccaagtaagcaaacatgtttcacatttgtaggggagtataattgtaactatttaggtaaggctttgtttggagagaaggaatggtatttctttagcccaagagatcggaaatatccgaacgggtcaagacccaatagagtagccgggtcgggttattggaaagcaacgggtactgacaaaattatcacggcggatggtcgtcgtgtcgggattaaaaaagctctggtcttttacgccggaaaagctcccaaaggcactaaaaccaactggattatgcacgagtatcgcttaatagaacattctcgtagccatggaagctccaagttggatgattgggtgttgtgtcgaatttacaagaaaacatctggatctcagagacaagctgttactcctgttcaagcttgtcgtgaagagcatagcacgaatgggtcgtcatcgtcttcttcatcacagcttgacgacgttcttgattcgttcccggagataaaagaccagtcttttaatcttcctcggatgaattcgctcaggacgattcttaacgggaactttgattgggctagcttggcaggtcttaatccaattccagagctagctccgaccaatggattaccgagttacggtggttacgatgcgtttcgagcggcggaaggtgaggcggagagtgggcatgtgaatcggcagcagaactcgagcgggttgactcagagtttcgggtacagctcgagtgggtttggtgtttcgggtcaaacattcgagtttaggcaatga

SEQ ID NO: 57 - DNA, 882 bp, Arabidopsis thaliana
atggcacagcccatgcgcttcatgctcaatcatatagaaacagaatcctacggcgctttcacccctcaaaaccttagtccgctgatcaatcgtgcgattccacacactcgagctcaaatctccggatcacctgtcgtagccgtcggccgaggatcatcaggtcggaccttctttggcgtcaatgtggaattaccaggtctgcctcttgaccactccatccacgccgaacagttccttctcgccaacctcgccctccacttcgagcaaaaactcgaatgcatagccatctccactaacggctactacttccaggagccatgcggccactgctgccaattacttcataaaatcagagatatgtctgataccaaaatcttgctcacgaacccaaccggtcagaaaggaacatacatgaatctttcgaccttccttccgcaaggattaatctcccaggcaaacgtccctcgccttctcgagcggaactttaactgcatcgaactcataaatcacagtctctacatggatatctgcagttattccgagcattgtaaccatctcaattgcagggctctaaaggcggcgaccatatcgtacgcgccggatagcaagtgtccgtcgggagtggcgctgattgatcaccgaggtaaagtgtacagtggagggtacatggaaagtgtggcgcataacactagtttggggccagtacaagccgcactggttgacttcgtggctaatggcgatggccaagagttcaaaaatatcgtcgaagcggtgctggtggagaagaaatgtggggtgttgagtcaagaggccactgcgaggatgattttagagaagatagccgaccccgactgcattttcagggtcttacattgcaaataa

SEQ ID NO: 58 - DNA, 303 bp, Arabidopsis thaliana
atggccggagaagaagactggagaaaaacagcagatacgacgaagatgagctcggagggagtaaaagctgccggcgttgagtcatcaaagaggccgccaggaagtaatccaggtggtgttcttcatcaacgccgtaacttgccatacagttacacgacgatggctctagccggattagctatctcgggggccatcatgtacactgttatgtatgctaagaagaagccggaagccactgccactgatgtagctaaggctgccacagggacggctaaacctgaagatacacatccaagaaagtaa

SEQ ID NO: 59 - DNA, 2607 bp, Arabidopsis thaliana
atggcggagaaagtatcggaggacgttatgcttctacacggtgacctcgatttgaaaattgttaaggctaggaggttacctaacatggatatgttctcagaacatttgcgccgtctcttcaccgcctgtaacgcctgtgctagacccaccgataccgatgatgtcgatcccagagataaaggcgaattcggtgataaaaacatccgtagccaccgtaaggttatcaccagcgatccttacgtcaccgtcgtcgttcctcaagcgactctagctcgaacacgtgttttgaaaaactcacaagagcctctttgggacgagaaattcaacatttctatagcgcatccgtttgcttatctcgagttccaggtcaaagacgacgatgttttcggtgctcaaatcattggcacggctaagatcccggttcgagacatcgcatcgggagaacgcatttctggttggtttcctgtactcggtgcttcgggaaaaccgcctaaggcagaaactgctattttcatcgatatgaaatttactccgtttgaccagatccatagctaccgatgtggaatcgccggagatccggagcgtaggggtgttagacggacttatttccctgtgaggaaaggaagtcaggtgaggctttaccaggacgctcatgttatggacggaacgttgccggcgattgggttagataacgggaaagtttatgagcatgggaagtgttgggaagatatatgttatgctatatctgaggctcaccatatgatttacattgttggttggtctatcttccataagattaagcttgttagggaaacaaaagttccaagagataaggatatgacgcttggggaattgctcaaatacaaatcccaggaaggtgttcgagttttgctacttgtatgggatgataagacttctcatgataagtttgggataaaaacgcctggagttatggggacacatgatgaggagactaggaagttcttcaagcattcttctgtgatatgcgttttgtcaccccggtatgccagcagtaagcttgggttgttcaaacaacaggcaagtcctagctcttctatatatatcatgacagttgttggaactctcttcacgcaccatcaaaagtgtgttcttgtagacactcaggctgttggtaataatcgcaaggtcaccgcttttattggaggtctagatctttgtgatggccgttatgacacacctgagcataggatactccacgatcttgacactgtatttaaggatgatttccacaatcctacatttccagctggtaccaaggccccaagacaaccttggcacgatttgcactgtaggatagatgggcctgcggcatatgatgttctcataaactttgagcagcgatggagaaaggcaacacgatggaaggagtttagcttacgtttaaaggggaaaactcactggcaagatgatgctttgatccggatagggcgtatatcatggattctgagtccagtgtttaaatttctgaaggatggtacttcgataattccagaggacgatccatgtgtttgggtttctaaagaagatgatccagagaactggcatgttcagatattccgttctatcgactcaggatccgtgaaaggatttccaaaatatgaagatgaggctgaggcccagcatctggaatgtgccaagcgtcttgttgtagataaaagcatccagactgcatacatccagacaatcagatctgctcagcatttcatatatatcgagaatcagtatttcctgggttcttcttatgcttggccttcttatagagacgcaggagctgacaatcttattcctatggagttggcactaaagattgttagcaaaatcagagctaaggaaagatttgccgtatatgttgtcataccattgtggcctgaaggcgacccaaagtctggccctgtgcaagaaattctatattggcagagccaaactatgcagatgatgtatgatgttatagcaaaagaactgaaagcggtgcaatcagatgctcatcctctcgattaccttaacttttactgccttggtaaacgagagcagcttccagatgatatgccagccaccaatggcagtgtggtatcagattcttataatttccagcgtttcatgatttacgtgcacgcaaaagggatgatagtagatgatgagtatgtactcatgggatctgctaatatcaaccaaagatctatggcaggcaccaaagatactgaaatcgccatgggcgcataccaacctaatcatacatgggctcacaagggaagacacccacgtggccaggtgtatggatacagaatgtcactatgggcagagcatttaggcaaaactggagatgagtttgtggagccatcagatctggaatgtctgaagaaggtgaacacaatctctgaagaaaactggaaaagattcatagacccgaaattctcagagctacaaggtcacttaataaagtatcctctacaagtagacgttgatggtaaagtaagccctcttcctgattacgagaccttcccagatgttggtggtaagatcattggagctcattccatggctcttcctgacactttaaccacgtaa

SEQ ID NO: 60 - DNA, 540 bp, Arabidopsis thaliana
atgaaggaggacgatgcattgccgacgacgacgacgactggtacggcgacgggaacagctatggcgaattcgaagaaggaaagctctgactcggtcttgtttggaagaggtcgatataagttctgggcgtttgctgcgattttgcttttggctttttggtcgatgtttactggcaccgtcactctccggttatctaccgggaatctgaaccggttatcggaagatctagggattccgaactacgataatctcgacgttctggaaatggaggagagagagaaagtggtgaagcatatgtgggatgtgtatactaatagtcgtcggatcaaattgcctagattttggcaagaggcttttgttgctgcttatgaagaactcactagtgatgtgcctggggttagagaagctgctattggtgaaatcgccaagatgtcggcgcggtcgatcactcttgatccacctccttctagatcaatgagtgcaagggatttgggaagaaacttgaagagaattctacacaagccagcagctagtagctga

SEQ ID NO: 61 - DNA, 1647 bp, Arabidopsis thaliana
atgagctcaagttcgaatccaccggtttgttcaccggaaaaggaggaaagaagtgaaatgaaaattgagattcaatgtatggagaataagcaaccattagctgcttcttgctcttctgcatccgaaggtagtggctgtttcttcctcaagtcacctgaaatcgcaactcctgccacagtatcttcatttcctcggaggactagtggacctatgagacgagcaaaaggtggttggactccagaggaggatgagacacttagacgagcagttgaaaagtataaggggaagaggtggaagaaaatagcggaatttttcccagagagaacagaagtccaatgcttgcacaggtggcagaaagttcttaatccagagcttgttaaaggaccttggactcaagaggaggatgataaaatcgttgaacttgtaaaaaaatatggacctgccaaatggtctgtcatcgccaagtccttaccaggtcgtattgggaaacaatgtcgagaaaggtggcacaaccatttaaatcctggtattagaaaggatgcttggaccgtagaagaagaatcagctctcatgaattctcatcgaatgtacggaaacaaatgggcggaaattgctaaggttttaccaggaaggactgataacgccataaagaaccattggaatagttcactgaagaaaaaattagagttctacttagcaactggtaacttgccaccgccagcaagcaaattcatcgttctgaaagatattgctgatggagacagagattccaagcagtctagtgcaactaaacctttcaaggattctgattcgcttacccaaacctcttcaggaaatacagattcaaatgaagttggaagagaccattttgactcttcttccgctctgcttgaagaagtagctgcttcacgaagaatcggtgtcaatgagtatgcttgctctcctgttgagtacaagcctcagttgcctaatctggaaccaatttcagaggaagtcagaatcaactcaaaagcttattttgagagatcaatccagaggaaagtagaaaacgggtttggaactccaaagcatgggaatttatactataagtctccacttgactattactttccatcagaagcggatctgcaacatatgtacggatatgaatgtggttgcagtcccggtgctgcatcaccagtcagcttaatgactacaccctgtaataaagacagtggtttaactgcaacgagaagtcctgaatctttcttgagagaagctgctaggacttttccaaacacaccttctatttttaggaaaaggcgaaaggttgttttggcagcgaaaacagatgctgttgttgttgttaatggtgtagttaaggaagttgatcgaaaagaagaaagtaaagatatgagaaaaagtttgttgctggagacaactgataattgcagtgatgatgaagaactcgggttaaatggaaatgctttcaatttgtctccaccatatcggttaagagctaaaagaacagctgtaatcaaatcaagacagcttgagtttacatctgaaaaggagaagcagccagataatgagattgagtttacatctgcaaaagagaagcagcctgataatgaaattaaaacgtctgaggaagacaagcctgtgtag

SEQ ID NO: 62 - DNA, 681 bp, Arabidopsis thaliana
atggacctaatacctcagcagctcaaggccgtaactcttacacacgtccggtaccgtcccggagatcagctcggacatttcctcgcctggatctctctcgtcccagtcttcattagcctcggtggattcgtctctcatttccttttccggcgtgagcttcaagggatcttcttcggtataggtctcgtgatctcacaattcatcaacgagtttatcaaaacatctgtagagcaagcgcgtcccgagacatgtacgttgctcgaagcttgcgattcacatggatggccatcaagccactcgcaattcatgttcttcttcgctacgtatttcagtttgatgggatgtaaaggaattggattctggtttggtttaagaagcagatggattatgaatcttcttcattggtctttagctgttgttaccatgtattctagggtttatttaggttaccacacggtggcgcaggtttttgctggtgcggctcttgggggtattgttggtgcgagttggttctgggtggtgaattctgtgttgtatccattttttccggtgattgaggagagtgtattggggagatggctatatgttaaggatacttcgcatattcctgatgtgttgaagtttgaatatgacaatgccagagctgctaggaaggatatggattctgctaaatctgattaa

SEQ ID NO: 63 - DNA, 447 bp, Arabidopsis thaliana
atggatcaagtactctactcctcttacatcataaaaatccctgtaatatcacgaatatcaccatcacaagctcaacttacgaccaggctcaataacacgacttattttggcttgtcatcgtcgagaggcaattttgggaaggtgtttgcaaaagagtctcgtaaagtgaaactgattagtccggaaggtgaggagcaagagatagaaggaaacgaagattgttgcatacttgagtctgcggagaacgcgggacttgaactgccatactcgtgtaggtcagggacttgtgggacatgttgtggaaagttggtgtcagggaaagtggatcagtcactagggtcctttcttgaggaagagcagattcaaaaaggttacatcctcacgtgtatcgcacttccactagaagattgtgttgtttacactcacaaacaatccgatcttatatga

SEQ ID NO: 64 - DNA, 1161 bp, Arabidopsis thaliana
atggcttcttcttcttgtttgaatctcttcttcttctcttttctctccgctctaatcatttctaaatctcagatctctgattccgttaacggggtcgttttccctgttgttaaagaccttccaaccggtcaatacctcgcacagattcgactcggtgactcaccggatccagtcaagctcgtagtcgatctggccggctcaattctctggtttgattgttcctcaagacatgtttcctcgtcaaggaacctaatatccggtagctctagcggctgcttaaaggcaaaagttggaaatgaacgagtatcatcatcatcatcatcgcgtaaagaccaaaacgccgattgcgaattacttgttaaaaacgacgcctttgggattacggcgagaggagagcttttcagtgacgtcatgtcggttggctctgttacttctccgggaaccgttgatctacttttcgcttgtactccaccgtggctgttacgtgggctcgctagtggagcccaaggagtaatgggcttaggaagggcccaaatctcactcccttcacaactcgccgcggaaactaacgaacgtcgtcggttaactgtttacctgtcgccgttgaacggtgtcgtatcaacgagttcggtggaggaggtttttggagtggctgcgtctagatcgctggtttacacgcctttgttaaccggttcgagtggcaactacgtaattaacgtgaaatcgattagagtcaacggggaaaagctctccgtggaaggtccgttggcggtggagctgagcacggtggttccttacacgattttagagagctcgatctacaaggtgttcgcggaagcttacgccaaagctgcgggtgaagctacatcggtgcctcctgtcgcaccgtttgggctctgcttcactagtgacgtagattttccggcggtagatctagcgttgcagagtgagatggtgcggtggaggattcatgggaagaatctgatggtggatgttggtggtggagtccgatgctcggggattgttgacggcgggtcaagtcgagtcaacccgattgtaatgggtgggctacaattagaaggctttatattggactttgatttgggtaactcaatgatgggctttggacaaagaacacgctctgattcaacttcgttgtaa

SEQ ID NO: 65 - DNA, 1389 bp, Arabidopsis thaliana
atggcggtgagctcattcgccgtccttcctccatttggttcctcatacagctccacaaccgatagatcttcttcttcttcgttttactcatcttcgaaacttctccgcatatctcaataccggttccagtcaaattcccgttgtccaaatgtgttcgtctcgtgctcactgaatcagccttctgatgatgcttccgacgccgccctttttctcgaatccaattcaattgctgattacatgcggttcaaacgccgtcccgaccccggaaatggtaccagcgagttgcagactgcaatcgtgagttacaagaaacgtttcccttggattcttctcaacccttttcttcaggtggatttggtctcaactattcatattgcagataaagagtacttcacaactcttcagaaggagcttgaaccatatgattctatcttgtatgagatggtggctagtaaagagaccttggaaaacaggagaaaccctattgcatctaagaggctcaagagttctcgttcaagaggtttcagtattcttgggttcattcagcggcagatggcaagagtactaacacttgattttcagctagattgtctagattacgatactgagaattggtaccatgctgatctcgatttcgagacattccagttgcttcagaaggagaaaggagaaagcttcttctcatttgccagggacatgactattagatcaacaaaagcaatgatacagccagctttggtaactgaaggtcgtgatacttggaggtcaaagcttctatgggtttcacgggtttttcctatgcctcttgtgggtcttttcctaatcggggctttttgtgctgactttggagatcagacctcagactatccagaattagaagcactttcacggcttgactttggagctgctatgaaggttttccttgctaagagattgacatccgagctaacactagagacatcagatatagaggaaaaatctgtcatcattggtgagagaaaccgagcagctacggaagctttaagaagagcaatagagcaaggacacaagagaattggaattctatatggcggaggccacatgcccgacctgggaagacgactgagagaagagtttgatcttgttccttcagaggtaagatgggtaacagcttggtccatcagaaatccaacggacttggagactagttcatatccgattctgaggaaaatggcagaggctttgcgttggccactaaaccggtaccaaacattggcattgctaatattttcatctgtacttgcactggatctctgcttttgggagctcttctttggttcgacaattgactgggctacccagataggtgcagagttataccagtttatagataatacaaaaattgtatga

SEQ ID NO: 66 - DNA, 456 bp, Arabidopsis thaliana
atgaagatttctctcttcctcctctctatcctcattctcttacccatctccctacaagatcctactcctgaagtcaagaaaccaactcgtgcacacgcagagctcacgaatcatggattcccaattggactcctacctttatctgtcaaagattacttcctcaaccaaacctccggcgacttctctcttttcctcaacggagcatgcaaaatcacgcttccacctgataactacatcgctacttattctaacaaagtaacgggtcggatctctcagggtaagatcgcggagctccaagggattcgggttcgggcgtttttcaagtcgtggtctattactgggattcgatcttctggagataatcttgtctttgaggttgctgggataactgctaaatacccttcgaagaatttcgatgagagtcttgattgtgaagggaaacgatcttcttcttga

SEQ ID NO: 67 - DNA, 756 bp, Arabidopsis thaliana
atgaattttcttgatttaccagaggaatgcatcgccaccatgatttctttcaccagccccttcgacgcatgccgtatctctgctgtctctaaattgcttcgctccgcggcggattccaataccacttgggagagatttcttccatcagattatcgtatgtatatcgataattctttatctagattttccaacaagcagctcttcctacgtttttgtgaatcccctcttctcatcgaggatggaagaacgagcttttggatggaaaagagaagcgggaagaaatgttggatgttatctgcaaggaaactagatattgtttgggttgatagtcctgaattctggatatgggtttcgattccggactcgagatttgaggaagttgcagggcttctaatggtatgttggtttgaaatccgaggtaaaataagcacatcccttctctccaaagccactaattacagtgcttaccttgttttcaaagaacaagaaatgggatcctttggatttgagtctctgcctttggaggttagctttcgttctacaagaactgaagtttataacaatagaagagtttttcttaagtcaggaacacaagagtctagagaagatgggtggttggagattgaacttggtgaatattatgttggttttgatgatgaggagatcgaaatgagcgtattggagactagagaaggcggttggaaaggcggaatcatcgttcaagggatcgagattaggccaaaagaattgttgtga

SEQ ID NO: 68 - DNA, 300 bp, Arabidopsis thaliana
atgagtgagaagcttgtgttcagaagcactagtggtggtgactactacggtgcaccatatggagagtatatggagaagagacagttgtttctcagaagctaccagttttcaagaaaacagagtttcgctgagaaagtttcaagatctgttacgagagtgaaacgagttgtgttgacaagattaagatcagctccgaaattgaaacgcgtcgtttggtcacgactcagatcggctttttactaccgtcggagacgtttttttcgacttcttcacttacacgaaccttgttattgtttctaa

SEQ ID NO: 69 - DNA, 1218 bp, Arabidopsis thaliana
atggcgtcagtgggtatagctcctaatcctggagcaagagactctactggtgttgataaattgcctgaagaaatgaatgacatgaaaattcgtgacgataaagaaatggaagcgacagtggtagatggaaatggaacagagactggacatatcattgtgactactattggtggtagaaatggccaaccaaaacagacaattagctacatggctgagcgtgttgttggtcacggatcttttggtgttgtgttccaagcgaaatgtcttgagacaggagaaactgttgcgataaagaaagttttacaagataggaggtacaagaaccgtgagcttcaaaccatgaggctacttgaccatcctaatgttgtgtctctgaaacattgtttcttctcaaccactgaaaaagatgagctttacctcaatcttgttcttgagtacgttccagaaactgttcatcgtgttatcaaacactacaacaaactgaatcagagaatgcctcttatatacgtcaaactttacacttatcagatttttagagccttatcttacattcaccgatgcattggtgtgtgtcatcgtgacataaaacctcaaaacttgttggtaaatccgcacactcatcaagtaaagctatgtgattttggaagtgcaaaagtattggtaaaaggagaaccaaacatttcctacatctgctcgaggtattacagagcacctgaacttatttttggagcaaccgagtatacgacagccattgatgtctggtctgcaggatgtgttctagctgaactattgcttggacagcccttgttccctggtgagagcggtgttgatcaacttgtagagattatcaaggtcttgggaacgcctactagagaagaaatcaagtgcatgaacccaaactacacggaattcaaattccctcagattaaagctcatccatggcacaagattttccacaaacgcatgcctccagaagctgttgatttggtctcaagacttcttcaatactctcctaatctacgaagtgccgctctcgacacattagtccacccattctttgatgagttaagagacccaaacgcacgtctacctaatggacgtttccttccaccgcttttcaacttcaagcctcacgagctgaaaggtgtaccattggagatggtagctaagttagtacctgagcatgcaaggaagcagtgtccttggctcggtttgtga

SEQ ID NO: 70 - DNA, 1242 bp, Arabidopsis thaliana
atgtcagaaaactgcaattctcgccatttctcatggctcatgaaatcttgtttaccaaatccctccgacgccaaatcactagtccagatccaccaaccgtcgtccacggcggcgaattcttcagctacaatcgcttctctacctgacgatttactcctcgaatgtatctcaagagtcccttcctcttcaattccttctctcgccgtcgtttgtcgccgttggtctcgtctcctccactctccttactttctccatctccgtcgtcgtttaggtttgctccgacattctctcttcgcgatatccaccgtcgattcaggacttttcgccgcggatttgcagtttcagtccgagattgcgtcgtggaaagtgtctcttgcggtttcgagtaggtctgttggcgttgacggtagttatggaagtttatctcatgctcgcgcggcggcgattggacctagggtttatgttgttagtagaaatgctgttttgagatacgattcgtggatgggaacgcttaatttgagatctccgatgattttccctcggaagaaattcgcaatcgcggttgtttctggtaagatctacgttgctggaggtggtggtggttcggaggttgcggcggcggtggaagagtatgatccggagttgaatcggtgggaagttgtgactcaatcggcgaggaagagatacggttgcatcggagcagccgttgacggagttttttatgtgatcggtggattgaaaattgggaatgagacctcacgcgcggtggcggcgcgtgcttatgcgagctctatggatcttttcgatgtggagtcgcgtcagtggttaaggagtcgttcggttcctggtggtggatgtgtagtggcggcgtgtgcggcggttggatatgtgtatgtgctaaccagtcacgcggtggagctttcgttttggcgatttgatgcgcgtcgtcgtggtggaaacagcgggtttggagaatggcagaggctgaaaagtccgccgttaccggcacaggtgcggttagatggaacggtgaggtttagctgcgtcggagtggaagataaagtggcggtggttcaggtggtgggatgcattgacgatttgcttcggcggagtgggaggggtgagagagggattagagaaagccttgtgttgctgtatgatacgacggagggagagtggaggagagcggcggatttacctgagatgattacacgcgccgcctgtgcgtgtgtggagtggtaa

SEQ ID NO: 71 - DNA, 1110 bp, Arabidopsis thaliana
atggctcttgttcagcggattccaatttcctcctccagtattcggaattggcaacaagcgaggaccaatttgactcctatttgttgtttacattacaatactgcatcttcttcttcttcaccctttacagagaagcactctgtggagagataccaaagggatcaatggctgtacaaagcggttgaaccaacgccaccatcgactccatctccatcgccatttgaagatgaagtctttgttagggaaaacgacattgcatcgcagctgcctgagctgaagaagcttttggcagtgctgaaagagaagagagttaaaggatgcaaaggtggtgattgtggaccaggagatgtgtatcttgttgggacagggccaggagatcctgagcttttgactcttaaagctgtcagagttattcaaagtgccgatcttttgctttacgacaggcttgtctccaatgatgtcttggagttggttgctcctgatgctagacttctttatgtcggcaaaactgctggttatcatagcagaactcaggaagagattcatgaactactcctaaattttgctgaagctggtgccactgttgtcaggcttaaaggtggagatcctctggtctttggacggggcggcgaagaaatggactttctgcaacagcaagggattcgagttcaagttataccagggataactgcggcgtcggggatagcagcagagttggggattccactaacacatcgaggtgttgcaactagtgtaaggtttctcactggtcattcaaggaaaggagggacagaccctctgtttgttgcagagaatgcagctgacccggatacaacacttgtcgtttatatgggtttgggaactttaccttctcttgcacaaaaactaatggaccatggtctcccttctgatacaccagctgttgcggttgaacgtggaaccactcctctacagcgtacagtttttgctgagcttaaagattttgcaactgagattcagtcagctggattggtgtcaccaacactcatcatcatagggaaagtcgttgagctctcacctttatggccacattgcacgaaagaatcctcctgccttgtagagacccggtag

SEQ ID NO: 72 - DNA, 1128 bp, Arabidopsis thaliana
atggatctatcaaaccgtcgcaatcctctccgggatctgagctttcctcctcctccgccgccacctattttccaccgtgcgagctctacggggacgagttttccgatcttagccgtcgcggtgatcggaatcttagccacagcatttttacttgtaagctattatgtttttgttatcaaatgttgtctcaactggcaccgaatcgacattcttggtcgattctcgttatctcgaaggcgacgcaacgaccaagatcctttaatggtttactctccagagcttagaagccgcggtcttgatgaatccgtcattagagcaatcccaatctttaagttcaagaagagatacgaccaaaacgacggcgtttttacaggagaaggagaagaagaagaagagaagagatctcaagaatgctctgtttgtttgagtgagtttcaagatgaggagaagctgaggattatcccaaattgttctcatttgtttcatatcgactgtatcgatgtgtggcttcagaacaacgccaattgtcctttgtgtagaactagggtttcttgtgacacaagttttcctccggatcgggtttctgcgccgagcacttctcccgagaatctggtcatgttaagaggtgagaacgagtatgtggtcattgagctgggcagtagcatcggtagtgacagagatagtccaagacacggaaggttacttacgggacaagaaaggtcaaattcaggttatctactgaacgaaaacacccaaaattcgatcagtccatctccgaagaagcttgaccgcggagggcttccaagaaaattccgaaagcttcacaagatgacgagtatgggagacgaatgcatcgacataagaagaggtaaagacgaacagttcggtagtattcagcccattagaagatcaatctcaatggattcatcggcggatagacagctttacttggcggttcaagaggcgattcggaaaaaccgcgaagttctggtggttggagacggaggaggatgtagcagtagtagtggcaatgttagtaattccaaagtgaagagatctttcttctcttttgggagcagtagacgttctagaagttcctctaaattgccactttattttgaaccctaa

SEQ ID NO: 73 - DNA, 1128 bp, Arabidopsis thaliana; identical to SEQ ID NO: 72

SEQ ID NO: 74 - DNA, 1362 bp, Arabidopsis thaliana
atggatcaaaaaagtaaaacgattggagaacaatggtggaggtcaaatccaacgtttaaaccgcctgaaacgccattagattctatggagtttttgtcacgtacttggagtgcttccgctactgaagtttcaagagctgtcgtcgcgtctccaccgacttctcaaccgccgcaaatgcgtttctcggagatccaaaacggttcttctgacgtcactttggtgccggaagatgaagaaaacggcatcgttcttggaaatactttttcttttgcttcttcagaaacttctttaatggtcatggaacgtatcatggctcagtcaccggagatttcatcgccacgaacatcagggagactttctcatagctcattcaccgacagtcctccgatctctccctccgacatcgacgactttaagcaattctaccgtgtgagcccttcctttaacggccacatacgtggttcatcagccattcccggcaccgccggagggtctaaaactgttggtcgttggctaaaggaccggcgagagaagaagagagaagagacgcgtgcacaaaatgcacagcttcacgcggctgtatctgtagctggagtggctgccgcggtggctgctatcgctgcagccactgcctctcagtcgagttctggaactgacgagcaagtggccaaaaatgactccgcggtggcttctgccgcgactttggtggcggcgaagtgtgtggaagctgcagagattatgggagctgatcgtgagcacttggcctccgttgttagttctgcggttaacgttcgttctgccggagatatcatgactttgaccgccgctgctgccacagctttgagaggagctgcacaattaaaggcaagagcattgaaggaggtatggaacattgcggctgtgattcctgtagataagggtacaccaaaaggcggtggtggtggttatagaggtggcgagttagcccctgtagataattttcttgggatttgcagtaaagaattgctagctaaaggttgcgaattgcttaaacgcacccgcaaaggtgatcttcattggaaagttgtttcgatctacattaatagaacaaagcaggtaatattgaagactaagagcaaacatgttgctgggaccatcacaaagaagaaaaagaatgtggtggtgggattggttaagggattaccggcgtggcctggccgggaaatgctcgagggtggagagaatttgaggtatttcgggctgaagacggtggagaaaagagtgattgaattcgagtgcaaaagccaaagggaatatgatctttggacacaaggtgtttccatgcttctttccattgcttctgataggaaacataaatgttga

SEQ ID NO: 75 - DNA, 501 bp, Arabidopsis thaliana
atgggcgagccactaggactgctccaggtgactgttattcaaggaaagaaactggtgatccgagatttcaagtcaagtgatccttatgtgattgtcaaattaggaaatgagtcagcgaagaccaaagtgatcaacaattgcctgaatccagtgtggaatgaggaactgaactttactctgaaagatcctgcagcagttctcgcattggaagtgtttgataaagataggttcaaggcagatgacaagatgggccatgcctctctcagccttcaaccgcttatctcagttgccagactaagacacgtagtccgcgtgtcctctggtgagacaacgcttaggaaagtattaccggatccagagaactgcgtatctcgagagagcacaatcagttgcatagacggagaggtggtgcagagtgtgtggctgaggctgtgtgctgttgaatcgggtgagattgagttgaagataaagttgattgatcctcctggaacaaacaagtag

SEQ ID NO: 76 - DNA, 729 bp, Arabidopsis thaliana
atgtttaacatttcttacgccaaacgaaacgctaaatatttatttaaattgctagcctggtgtatgatgatcgaggaagctggacctaacatcggtaacaagcaaaaagtagttctccaacttagcaaaatgctaataatgtatatcattctccatataaacgctgcgttttggacatggaggggatacttaaaacgctgcgttttacactttgttttcccgcgtatatttctccctttattatcggatagcccaacaatcacacaggcgaagaaacctagctattgcttcgccatggacgtcggaggagaagacataagcgatctccaggtagaccaaatcgttgaagaatattctatggacgatctcattagagaccgattcagactctccgcgatctctatcgccgaagccgaggcgaagaaaaatggaatggaaataggtggacctgttgtggcatgtgtggcagatttagccttcaaatatgcagaaaacgttgcaaaggatcttgaactattcgctcatcatgctggacgcaaagttgtgaacatggacgatgttgttctctccgcgcatagaaacgataacttagcagcatctttgaggtcactatgcaatgagctaaaggcaaaggagccacaatctgagaggaaacgcaagaaaggatcagccaagaaagaagacaaagccagtagtagcaatgccgttcgcatcacgaccgatctgtaa

SEQ ID NO: 77 - DNA, 729 bp, Arabidopsis thaliana; identical to SEQ ID NO: 76

SEQ ID NO: 78 - DNA, 2007 bp, Arabidopsis thaliana
atgattcgaggattgcttttgggaatcatctggatgatattttgtgtttgttcatcatttcagcaagagacgccgtttgtttacaacaactttggtcacgtagatcatcttcaccttgacggtagtgcaagaatcattcccagtggtggtatcctgcaactgacaaatgcaaccaatagccaaataggtcatgttttctacgagaagccgattgagttcaaatcatctgaatcagtctcgttctcgacatattttgtgtgtgcactgctccctgctggtgatccgagtggccatggcatgaccttttttgtgtctcattccactgatttcaaaggcgcagaagcaactcgatacttcgggattttcaacagaaatggttctacttccacacgtgtgttggctgtagagcttgacacttctctagcttcagatgtgaaagacatcagcgataatcatgttgggattgatgtgaacagcgcagagtctattacatctgccaatgcttcttatttttcagacaaagaagggaagaagattgacataaaactcttgagtggtgatcctatccaggtttgggtggactatgaaggaacaacgctcaacgtttcattggctcctcttagaaacaagaaaccaagccgacctcttttgtcatcaacatccatcaatctaactgatattttgcaaggtagaagaatgtttgttgggttttctggctcaaccggatcaagcatgagttaccagtacatactcgggtggagtttcagcaaaagcatggcgtctctgccgaacattgacatctcaaaacttcccaaagttcctcactctagcactaaaaagaagtctacatctcctgtgctcagtgttctgcttggtttaatagctttcatagttttggggattcttgttgtagcttatttgtataggagaaacttgtactctgaagtaagagaggaatgggaaaaagagtatggtccaattaggtattcctacaaatctctatacaaagcaaccaaaggattcaataggagtgaatttcttgggagaggaggttttggtgaagtctacaaaggaactctccctcggagcagagaactgagagaagtagcagtgaagcgagtatcacatgatggtgagcacggtatgaagcaatttgttgctgagatcgtgagcatgaggagtttaaaacaccggagcttggttccacttcttgggtattgcaggagaaaacatgagttattactggtgtctgagtacatgccaaatggtagtcttgaccattacttgtttaatcatgatagattgtctcttccctggtggagaagacttgcgatccttagggacatcgcatcagctcttagttacttacatacagaagctgaccaagttgttatacacagagacatcaaagctgcaaatgttatgttggatgcagagttcaatggaaggttgggagattttggtatgtccaggttatatgacagaggggctgatccaagcacaacagctgcagtgggaactgttggttacatggcacctgagcttacaacaatgggagcttctactggaactgatgtgtacgcgtttggtgttttcttgcttgaagtaacttgtgggaggagacctgtggaacccggcttacctgaagcaaaacgttttctgatcaaatgggttagtgaatgctggaaaaggtcttctttgattgatgctagagatccaaggttgacagaattctcatcccaggaagtcgagaaggttctgaaactcggtttgctatgtgcaaaccttgctccagattcaagaccggccatggaacaagtggtgcaatacttaaatggaaacctagctttacccgagttttggcccaattctccagggattggagttctgtctccaatggcgctttccccagcaccactcgtgatcccttcactatcattttcgtcttcctcctccaacaactctatgtttattactcactcagtcctctacgggagtgggcgatga

SEQ ID NO: 79 - DNA, 984 bp, Arabidopsis thaliana
atgtccgaaccaagtccaatcgctgatccttatgcttatcttaacatcgtaaataatccagatggttcaatcactcgcgacctcagcaacttcccctgcaccgcagctacacctgatccttccccactaaaccccgccgtttcaaaagatcttcccgttaaccaattaaagtcaacgtggctccgtctctaccttccctcctccgccgtcaacgagggtaacgtttcgtctcagaaactccccattgttgtgtattaccatggcggaggattcatcctctgcagcgtcgatatgcaactcttccacgatttctgctccgaggtggctcgtgatctcaacgccatcgtcgtatctccttcgtaccgattagctccagagcatcgattaccggcggcgtatgacgacggagttgaggcgttggattggattaaaacctccgacgatgagtggatcaaatctcacgccgatttctcaaatgtgtttcttatgggaactagcgccggagggaatttggcttacaacgtcggactaagatccgtcgattccgtctccgatctgagtccgttacagatccgtggattgattctacaccatccattcttcggcggagaagagcgaagtgaatctgagattagacttatgaacgatcaggtttgtcctcccatagtcaccgatgtaatgtgggatctgtctcttcccgtcggcgttgaccgagatcatgagtattcgaatccgacggttggagatggatcggagaagttggaaaaaatcggacggttgagatggaaagtgatgatgattggaggagaggatgatccgatgatagatctgcagaaagatgtggcaaagctgatgaagaagaaaggagtagaagtggtggagcattataccggcggccatgttcacggtgctgaaatcagagatccttctaaacgtaaaactctgtttctttccatcaaaaacttcatattctctgttctgtaa

SEQ ID NO: 80 - DNA, 984 bp, Arabidopsis thaliana; identical to SEQ ID NO: 79

SEQ ID NO: 81 - DNA, 292 bp, Zea mays
acaagcgatgacgatgagtgagtatgtgtgtgccgaacgcgctctcgagatgatagatgtatatcatcatttcttgcctccaagctagctagctaataataacttagggcttgtttgggagcaagcccttagtttactctcttgtagtagtaatattaattaatgtgtagcttgcctagctagttagaaataaaaaaggcgtttatgacgaatgagcagctaatgatgtactagagttgataagtcaggataattgctgactccatgtatttatatggatgcttcgaaggta

SEQ ID NO: 82 - DNA, 543 bp, Zea mays
atggaagccgtggtggccacgacgacaacgagggtgtccttccctctgctgcccaccgcggggaggcccctgctcccgccggtcctggcgcggccccgccgcggcttcgcctccgtctccgccacctccacatccggcgcaggcggcggcggggggcgctcatctgcaggcggctgcggcggcgacggtggaggggacgactccggtgccggcgcagccgcggccgccgcggctgtggcggctctgggtgagtccgagcagcaggaggacggcgactctgacgcaatcgtgctccatgtcgggggaatgacgtgcggcggatgtgcggacaaggtgaagcgaattctggagagccagcctgaggttgctgcagctacagttgatgtcgaaaaggccaccgctattgtgtggacgacacctgaagcgaaggctaccaaagactggcaaaaacaattggccgagaaacttgccaaccatctcacctcttgcgggttccagtctcatctgcaagacgaaggcgaggctgaacaaactgatgcttaa

SEQ ID NO: 83 - DNA, 780 bp, Zea mays
atggctgagcagcagccgccccattctccttacccggcggtgcaagtgcaacgaccgggaccgccagcaggccacagccgccaggctggttcggcttcagcctcgcctcattctccttctccagtggtgcagggcgactactacgggacggcggcggcggccgcgacgagctcgggggagccgtcgccgcggtcgtccgggaagcacgcattctaccgcggcatacggtgcaggagcggcaagtgggtgtcggagatccgggagccccgcaaggcgcgccgcatatggctcggcacgtacccgacgcccgagatggccgcggccgcctacgacgtggcggcgcgcgcgctgcgcggcgcagacgccgtgctcaacttccccggcgcgatcgcctcgcgcgcggccccggcgtccgcgtcccccgctgacatacgcgccgcggccgccgccgccgcgcaggcgcagctcgagtactcgcagtcgcagggtgccgccagtaatcctcttgccgccgccgctgcacagggccggcatcagcagcagcaccacggggcgagcagtacggcgacagctgacgcggcgggctacaccgcgccgcagcaggagatgggcactgacgagttcatggacgaagaggccatcttcgagatgccgcagctcctgcggaacatggcggccgggatgatgatgagcccgccgaggctcagccccgacacctccgacgagtcgcccgacccgtccgaggccggggagagcctctggagctaccatgacccgtag

SEQ ID NO: 84 - DNA, 1587 bp, Zea mays
atggcgttcctcgcgcctccgcagttcaagtggcccctttccacccgtgcggcggcggtgttcagggagcccaccggcggcgcaggctcccgccccagtcggataaactgttctttctcctccacggcagtcgtcgatgcagagtgcttatccgtcgggccgccgccttctcctcaccgaacgcttccgggctgtttcggtgaggcacttcttaacaaggaggcagtggtggcggccgcggccgcggaagccgtcgctctggctcgcgcagcggccgaggtcgccggagaagtcgcccggatggcgcagaatgatcacccggctgccttaccgccgcgcgatgacacggtggatagcttcctgtcaagagaggtcctccgctccgaggtggggctggatgccaggcgcgccgggctcgtcgaaatgctggagggcgaagagcacagcagcattttcagcgacgaatccgaggatgacgatgatggcgggcatagcatagccgtaacggtgaagtcggcgcggcggtccgagagaagggctcggagagtgagggcagcgatgaagacggccaagtgttccagcagcatgaagcccgttggagcgtcctccacaaggaggaaacggttgaagggttgcctgactcctctcgggtgcttgtacaagatgaccggcccgaggcttctgacggcggaacaagaagtcgaattctcagaaggcattcaggaccttctgaaactggaagccatccaaaaggaggttgcgcagtataatgctggtgaaccaacgttttcccagtgggcggcagcagccgggaccgatgagaacactctgcggagacgcctgaatcatggagtctactgcaagaacaggatggtgaaatctaacgtgcggcttgtaatctcgattgcaaaagaacacgaaggccccgggatggagttctctgatcttattcaggatggaatgcaaggcctgataagaggcgcggaaaagttcgacgcttccaagggttttagattctccacttactctcactggtggattaaacaagcaatacgcaagtccgttttagaacaaacccagataatccgcctgccggcacacatggctgaagcgagttcccgagtgaaggaatgctgccggcgactcggccgtgagctgaaacggctccccagcaacgaagagatcgcggtggacactggcatgacgatccggcgggtggaggcggccatgagcctcccgaaatacagcgtgtccttcacgagcaaggtcgggtgcacggacgtcacgtaccaggagatcatgccggacacgagcgccgagacggcggaggagacgctgcaccggtggctgatgaagaaggacgtgaacacggcgctggacagcctgagcccgcgcgagaagcaggtgatgcggtaccggttcggcatcgagggcgggcgggccaggaccctgcacgacatcgggcagctcatgggggtcagccgggagcggatccggcagatcgagctgggcgcgttccggaagctgcggagcaagaacaggttgcagtcgctgcagcactacctgcggccggcggagagctggtag

SEQ ID NO: 85 - DNA, 960 bp, Zea mays
atgacgctggatcagaaccatgccatgccgatgcagcccccggccctgcagcccggaaggaagaagcgacctcgcagatcacgagatgggcctacgtcagtggcagctgtcatccagcggtgggctgagcgcaacaagcatttggagtatgaggaatctgaggaggcaaagcgaccaagaaaagcacctgcaaagggttcaaagaagggctgtatgaagggaaaaggggggcctgacaatactcaatgtggataccgtggagtgaggcagcgtacttgggggaagtgggttgctgaaataagagagccaaatcgtgtcgacagactctggctgggtaccttcccaaccgcggaggatgcagctagggcctatgatgaggcagccagagcgatgtatggagacttggcacggactaacttccccggacaggatgcaacaacctctgcccaagctgctctatcatcgacctctgcccaggctgctccaacagctgttgaagctcttcagactggcacgtcatgcgagtcgacaacgacatcaaatcactcggacatcgcatccacctcacacaagcttgaagcctctgacatctcgagctacctaaaggaaaaatgtccagctggatcatgtggtatccaagacggcacacccattgtagctgacaaggaggtctttgggccgttggagcctatcacaaatcttccagatggtggtgatggttttgatatcggtgagatgctgaggatgatggaaagcgatccacataatgcaggtggagccgacgctggcatgggacagccctggtatcttgatgagctggattcgagtgtcttagagagcatgctccagccggagccggagccagagccagagccattcctgatgtctgaagaaccggacatgtttcttgctggcttcgaaagcgctggtttcgtcgagggtctggagcggctaaactga

SEQ ID NO: 86 - DNA, 1830 bp, Zea mays
atggatcaacttgccctgcttgcgacggagctgggtgactcgtcagactttgaggtggagggcatccagaacctcactgagaacgatgtcagtgacgaggagattgagcccgaggacctggcgcggcgaatgtggaaggacagagtcaggctgaggaggatcaaggagcggcagcacaagcttgccctgcagcaggcagagctgcagaagttgaggcccaagcccatatccgaccaggccatgcgcaagaagatgtcaagggcacacgacgggatcctcaagtatatgctcaagctcatgcaggtgtgcaatgcacgcgggttcgtttatgggatcatcccggacaaggggaagcctgtcagtggcgcttccgataatatcagagcttggtggaaggagaaggtgaagtttgataagaacgggcctgcggcgattgagaaatacgagtctgacaacttagtatccgctactgcccagagtggtggaactaagagccagcacagcttgatggatctccaagatgccactcttggttcactgctttcctcattgatgcagcattgtgatccaccgcagcgcaagtacccattggagaagggtgcttcacccccgtggtggccttcagggaaggaggaatggtggaccgccctgggtcttccaagcggccaagttcctccttacaagaaaccacatgatcttaagaaggtctggaaggctggtgtgcttacaggtgtaatcaagcacatgtctcccaattttgataagataaggaatcatgtacggaaatcaaagtgtttgcaggataaaatgactgcaaaagaaagcctgatttggctgggagttctacagagagaagaaagccttgttcacagaatcgacaatggcgtatcggagattactcagcgcagtatgccagaggagaggattgcagacacaaatagcagcagtaatgagtatgatgtgtatggttttgaggatgctcctgtttctacatcatctaaagatgatgaacaagatctgtctccagttgcacaatctgctgtggagcatgttccgaaaagaggaagggaaagagcttacaataaacgccctaatcaaatcgttcctggtaaggcaaaagaaccaccaaagagaaaaagaacacgccacagctccactgttaccgagccagatgcacacagagttgttgatgcaccagaaaactcaagaaatttgatccctgatatgaatagattggatcaagtagaaatcccaggcacgtcaaaccagattgtcacctttgaccatgggggcaccacaactgaagctttacaacacagaggagatgctcaagtacaggtccatcctcctggtgctgaggttaatagcttctatagtgctccaactgcaaaccctactcctataagcatatatatgggtgaccagcctataccttatcaaaataatgacagcacaaggccgagatctgaaaatagttttcctgtagatgctcatactggtttaaataatcttcccagcagttatcagaacttacctccgaaacaatcactaccacttcccatgatggatcatcatgtggttcccatgggtatcagggcacctactgatagcattccttacggtgatcatatactaggtggtggaaattcaacttctgttcctggagatatgcagcaactcatagattttcctttctatgctgaacaagataagtttgttggcagttcctttgaggggttgcctttagactatatcagtatcagtagtccaatcccagatattgatgacttgctgcatgatgatgatttaatggaatacttgggaacataa

SEQ ID NO: 87 - DNA, 510 bp, Zea mays
atggcggccaccaccagccaggcgagcctcctcctgcagaagcagctcagagatctcgccaagcacccggtggatgggttctcggctgggctggtcgacgatagtaacgtattcgagtggcaggtcaccatcatcggcccgcccgataccctatatgatggagggtacttcaatgcaataatgagcttcccagaaaattacccaaacagcccgccatcagtcagatttacctctgaaatgtggcatccaaatgtttattcagatgggctggtgtgtatctctattcttcatccacctggtgaagatccaagtggttatgagctcgcaagtgagcgttggacacctgtgcatacagttgaaagcatagttctgagcattatatcaatgctctctagtccaaatgacgagtctgcagcaaacattgaggcagctaaggaatggagggataagagggaggatttcaagaaaagggtcaggcgcatcgtgcggaaatcacaggaaatgttatga

SEQ ID NO: 88 - DNA, 519 bp, Zea mays
atggatgaaaaagattggctgtcactagtcgcggtgcacagtgatgcttggttgctggctgtggccttttacttcggtgcaagatttggttttgacaaagaatccaggaagcgcctttttgtcatgattaataacctccctacaatatatgaagttgtcacgggaactgccaagaagcaaaccaaggagaaaactccgaaaagcagcagcaagagcaataaagctggcccaaaaccgccacgccagccagaacccaactcaaggggttcgaagatgccacctccgaaggatgaggatgacagcggaggcgaggaagaggaggaagaggaagatcacgaaaacacgctgtgtggttcttgtggtgacaactacggacaggatgagttctggatatgctgcgatgcgtgcgagacttggttccatggcaagtgtgtcaagatcactcctgccaaggccgaacacatcaagcactacaagtgtccgaactgcagcggtagtggcaagagagcccgagcatga

SEQ ID NO: 89 - DNA, 834 bp, Zea mays
atgctgctgatgctacacgaaactcttcctttcgtgaggccgacgagttcttgccgggacccaaaactctccgagaagagtgcctctgctttccacggtaaattgggatgcagtgcggtctgcagttcagcggaaggctatcgtgtacagaagccgcacattgttcacagctacaaagttagcttcactaggaccagccatcatctgtgtaaaagcttaaacgagagaactacaaggcactgcctgcatcggttccatgttaatgcttcgcccgatgacgacgacttccgctcatcgcgtaacatagcgatcagtttgttcaagcggtacaagaatgtcattgaccgaggaggtggagaaaacctaaatgagtttgtcagtgctggagtgaccgcttacgcactagggtgtacagatgaggggcttagaaaggaacttatggatattgaagattctggtctggagattgaaggcttagggtccttggggggcaccagcctcaagttcaaagtccactcctttgagatccgtgagtgcatcctgtggctcagtatagtgttcgtcacaatactgtgcacaccacaactaacagttatcaggtggtctccgaacccaccggtgtcagccgacgtcttgcatcagtggaaaggattctgtgctctaatcgcgaacgcttactatgtcaaaggaatggcatggttgccagtgaaaaccttgcagctggaacagatggctgtcacaggaagttcagagaaaccatcagtagttgctagtcgcatgcagttagttttcagcacattagaggtagtcagcccacagtggccaagagtgtga

SEQ ID NO: 90 - DNA, 1230 bp, Zea mays
atggcggcgtacttgagcatgggtgaagcgcaacgccgcatcggcgactacctctctcgggtgaccaacgccatctcctgctccgacgccgccgcgctcgcctcccttctttccgtctcctccgcgccggcctccaccccgctctccgacgcgctcgccgccatcccggacttcccgcgcctcgctggagatcgctaccccgaccttgccgacctcctcgttccgttgctccgagccatccacttccactccatccagcgcttcgccgacgcctactcctcgttcgagaaggcctccaacgcgttcctgcaggagtttaggaactgggagacgccgtgggcgatggaggcgatgcacactgtggcgctcgagatcaggctaatcgccgagaaggcagatagggagcttgcgacgaatggaaagaaccctgacaagcttcaggcggctgggtcttttctgatgaaggtttttggtacactagcggtgaaagggcctaagcgtattggggcactctatgttacctgccagctattcaaaatttacttcaggcttggaacagtaaacctttgccgtagtgtcataagaagtatcgaaactgcaaggaattttgattttgaagactttccagtgaaagacaaggtcacttatatgtactacactgggcggttggaggtgtttaacgagaactttcttgttgcagatcagaagctaacttatgctttgatgcattgcaatcctcaaagcgagtcaaatttgaggagaattttgaagttccttatccctgtaaagctttcaataggtgtactgccaaaaaggactcttttggagcggtatagtttgcttgagtatgcagatgttgtcactgcacttaagagaggagatctcaggcttctcaggcaagctctagacaggcacgaagaccaatttttgaaatctggcgtctaccttgtactggagaaacttgaacttcaagtctatcagagattagttaagaaaatccacatcattcagagacagaaggaaccagctaaggcacatcagattaagctagatgttgtcgtaaaagctctgaaatggcttgaaatcgacatggatgtggatgaggtggagtgcatcatggcatgccttatatacaagaaccttataaaagggtactttgctcacaagagtaaggtccttgtcctcagcaaacaagaccccttccccaagttgaacgggaagcctgtttaa

SEQ ID NO: 91 - DNA, 1521 bp, Zea mays
atggctccggtgcttcctgcgtctgcgtggtggtcgtggatcgcggtcctggcggtggtgctggccgtcggcgtccggccgcctccgcgctgccgcggcgagttcacggtggtggtgccggacacgtcggcagcggcgctggtggacgcgccgcagacggggttctcggaccgggcgcgcaccgacccggccgagcagcgcgccgtgcaggaggtgatggcggccacgggcaacggctgggcgtgggccatcccggacgtgtgccggggccgctggcacggcatcgagtgcgtgcccgaccgccgcgacacctaccacgtcgtgtcgctggccttcggcgcgctctccgacgacacggccttccccgcgtgcgaggcggcgagcgccacgctctcgcccgccgtgctcgcgctcccgcacctccgctccctcttcttctaccgctgcttcacgggcaacccgcagcccgtcgcggcattgctcggccgcctcggccccgcgttccgctccctcgtgctccgacagaacggccacgtcggcccgatccccgcggagctcgggaacctcaaggagctgcgcgtgctcgacctccacggcaaccagctcacctccgccgtgccggccaccctccagtccctgagccacctccagctgctcgacctcagctacaaccgtctcgccggcccggtgccgcgcttcgagttcccgcgcctcagcatcctggacctcagccacaacgcgctccagggtggcgtgccgtggagcctcggccaatgccgctctctgctgaagattgacctcagccagaaccgcctcaccggcacgatccctgacgcgctcggcgacttgtcccaactcatgctgctggacctcagccacaacgcgctgtccggcccgatcccggccgcgctcagccggctggcgtcgctgcggtccctcatcctcagcgacaaccggatgcagttctcgactctgcccgacgacttcttcgctgggctcaaggcgctgaccacgctggtgctctccggaatgggcttggccggggcgatccctgagtccatcggggagctgagcgagcttcgggtgctgaggctggacaataaccagttcaccggcgtaataccggcgagcttccggaggctggagagggtgagcgagctccgcgtggacggcaaccggctggtggggccgataccgttcggcaaggagatgatgtggaggctgggcaagaagctgcgcgtcggctccaacgaggggctgtgctatgacaccaagcaacaaggcctcgagggcgtcgttgcgctcgccggcgtcgcggactgtgacagcgtgaggagtcgcacgacgcagcacttggtttggagcaatagtactgtagttagccgcggcggcggcgtgtacaccgtgacctcatcggctgcttccgccagccgtaactccggtggcggtactcgtgtggagacttggcttgtgttcgtgtgtctgcaccttgcatggttcgtagcctgtaattgtaagtag

SEQ ID NO: 92 - DNA, 2070 bp, Zea mays
atgggagctgtagattacatatatctatctggaaattcactcaccgggaacatacctggatggttattaagaagaaacaagatcgcggacatatcttttaataacttcacgatggggagttcaggtccgagccaatgccttcaagggagtgtcaatctggtggagagctattcagctgaagtgaaccgtttaaatagtattcatccatgcttaaagaggaacttcccatgtgttgcttcgaatggacaatatcactcttcactgcatatcaattgcggcgacaaagaagcaactattaacggaactaaatatgaagccgacacaacacccaaaggggcatcattgttgtatgtgtccccaggcttgaactgggcattcagcagcaccgggaacttcatggacgacaacataaatgacgacaactacatagcaacaagtgcatcaaaattggccgtgcccaattcagatctgtacaacaaagcccgtctttctcctctttcgctcacatattatgggctttgcatgttaagtgggagctacacagttaatctccactttgctgaaattgttttcacaaatgacagcacatattatagccttggcaaaaggagattcaacgtgtttatacaggggagaatggtgctagaggatttcgatattgaacagtcatccggtgcggctgcaaaaccagttaccaagacttttcaaacatatgttacaaatcacactctagagattcagttctattgggcaggaagagggacaacaggcattccatatagaggttcttatggcccactgatatctgcaatatcagtaactccaaatttccaaattccattggctgttgaccctcccaaagctggaagtagggaaaaaaggagttcaagggcatctattgctttaggaattggaattcctattgtagcaatattcactgctctgattctcggcatttattgtattaagaagcagagaaagagttcgatgcatgaagaactcagagcccttgacctgcaaattggctccttcaccttgcgtcaaatcaaagcagcaactaggaacttcgatgcagctaacaagattggtgaaggaggatttggttcggtttacaagggtttattatccgatggcaccatcatcgctgtcaagcagttatcatcaaggtctaaacaagggaatcgggaatttgtgaacgagataggcatgatatctgcactccagcatccaaaccttgtcaaactctacggctgctgtacagaaggaaaccagctgtcgctagtttatgagtacatggaaaacaattgcctcgcacgagctcttttcgttgaacagtatagactgagaatggattggggaacaaggcataagatttgccttggaatagcgaaaggtctagcatatttgcatgaagagtctgcaataaggatcgtgcacagagatataaaggccagcaatatactgctcgacaaagatttgaatgccaagatctcagattttgggctagcaaagcttaatgaagatgatcacacccacataagcacaaaagtagctggaactatcggttacatggctcctgagtatgctatgcgtggttatttaacagataaagctgatgtatacagttttggtgttgttgttttggaaattgtcagtggaaaaagtaacacaaactacaggccgaaggaagactttgtttatcttttagattgggcttgtgttctacatgagagaggaactctactggaattggttgatccagatctaggatccaattactcgacagaagaagcgctcctcatgctgaatgttgccctgctatgcacaactgcggcgcctacactcagaccaaagatgtcaaaagttgttagcctgcttgaaggcagtgccccactgcagcctttgctgtcagacctcagccttgcagcaaatagcctgagctcaagtggtgtacgcaggaacttctggcaaaacccaggtgagagtcagagcctgacagcacaagcttcatgcagcgatactaatgaatcatccaccattgatatagatggtattctactggtaagttag

SEQ ID NO: 93 - DNA, 2289 bp, Zea mays
atggcgatcctctcggcgctcgccaccgaggtgctcatccccgtcgccgccgtcatcggcatcgccttcgccgtcgtgcagtgggtggtcgtgtcgcgcgtgaagctctccccggccgcgtccggcggcagcggcggcaaggccggctacgccgactccctcatcgaggaggaggaggggctcaacgaccacaacgtcgtcgtcaagtgcgccgagatccagaacgccatctccgaaggagcaacatcgtttcttttcaccgagtaccaatatgttggtatcttcatggctatcttcgctgttgtgatcttcctcttccttggttcggttgagggattcagcacgaagagccagccctgcacatatagcaaggacaagtactgcaagcctgcgctgttcactgcactctttagcactgtgtccttcttgcttggagccatcacctctctggtctctggtttccttggcatgaagattgccacatatgcgaatgccagaactaccctggaagctaggaagggtgttggcaaggcttttatcactgctttccgctctggcgctgttatgggtttcctgcttgcatcaagtgggcttgtggttctgtacatcacaattaatgtatttaagttgtattacggtgatgactgggagggtctttttgagtccatcactggctatggtcttggtgggtcgtccatggctctcttcggaagagttggtggaggtatctacacaaaggctgctgatgttggtgccgatcttgttggaaaggtcgagaggaacattcctgaggatgatcctaggaacccagctgtgattgctgataatgtcggtgacaatgttggtgacattgctggaatgggatctgatctctttgggtcatacgcagagtcttcttgtgctgcccttgttgttgcgtctatttcatctttcggaatcgaccatgatttcactgggatgtgctacccactccttgttagctctgttggtatcattgtctgcttgatcaccaccctttttgctactgatttctttgaagtcaaggctgtgaaagaaattgagcctgcacttaagaagcagctcatcatctccaccgtcctgatgacttttggtattgctctaatcagctggttggcccttccagctaagttcaccatctacaacttcggtactcagaaggaggtttccaactggggtttgttcttctgtgtttcaattggtctgtgggctggtttgattattggttttgtcacagaatactacactagcaatgcatacagtcctgtgcaagatgttgcggattcgtgcagaactggtgctgccactaatgtcatttttggtcttgctcttggatacaagtctgttatcatcccgattttcgctattgctgttagcatctatgtcagtttctccattgctgcgatgtacggcattgcagttgccgctcttggtatgctgagcacaatcgcaactggtcttgctattgatgcttatggtcccatcagtgacaatgctggtggtattgctgagatggctggaatgagccacagaatccgtgagagaactgatgctcttgatgctgctggcaacacaactgctgctattggaaaggggtttgccattggttcagctgctcttgtgtccctggcgctttttggtgcctttgtcagcagagctggagtgaaggtcgtcgacgtcctctcccccaaggttttcattggtttgattgttggagccatgcttccgtactggttctctgccatgaccatgaagagtgttggaagcgctgccctgaagatggtggaggaggtccgcaggcagttcaacaccattcctgggttgatggagggaacagccaagcccgactacgcaacctgtgtgaagatctccactgatgcttccatcaaggagatgattcctccgggcgctctggtcatgctgactcccctcatcgttggaaccctctttggcgtcgagactctctccggcgttcttgctggtgccctggtttctggagtgcagatcgccatctctgcttccaacaccggcggtgcatgggacaatgccaagaagtacatcgaggctggtgccagcgagcacgcgaggaccctcggtcccaagggatccgactgccacaaggccgctgtgatcggtgacaccattggtgaccccctgaaggacacctccggcccgtccctcaacatcctcatcaagctcatggccgtggagtccctcgtgtttgcccccttctttgccacccagggtggcctgctcttcaagtacctgtaa

SEQ ID NO: 94 - DNA, 447 bp, Zea mays
atggaggcggtggtcgtcgacgcgggctctaagctgctcaaggccggcatcgcggcgcccgaccaggcacccccactggtaatgccgtcgaagatgaagctggatgttgaggaccaggagatggctgacggcgcggtggtagaggaggtggtgcaccctgtggtgcgcggcttcgtcaaggactgggacgccatggaggacctactcaactacgtcctgtacagggacattgggtgggagattggggacgagggtcagattctcttcaccgaacccctcttcacgccaaagactcttcgggagcaattggtgcagcttatgtttgaaaagttcaatgtttcaggcttttatgcctctgaacaggctgtattgtcactctatgctgttggacgcatttcaggatgtaccgttgacattggtcacgggaaaataggttataacaattga

SEQ ID NO: 95 - DNA, 435 bp, Zea mays
atgtctgccgcgaaccagctcgccgctctggtcagcaacatgtacgccacgggtttgcttgacgatcagttccagcagctccagctgctccaggaccccagcgcccctgacttcgtctccgaggtcgtcacgctcttctgtcaggacggcgagcggatcatcgaagagctggccaaactgctggagaagcccaacgtggattttgacagggttgacgcctttgtgcatcagctcaagggaagcagtgcaaatattggtgctcagaaggttaagaacacttgcattcagttccgcgaattctgtcagcagaagagcagagatgggtgcctcaaggtactggagacaatgaggattaacttctatgagctgcgtggcaagtttcagaccatgcttcagctggagcgtcaggtcaatggctttccccccaacaagtaa

SEQ ID NO: 96 - DNA, 474 bp, Zea mays
atggggatctcgagcatgccggagccgcgggacagcctgctggggtacctggtgtacaacacggtgatctcgatcgcggcgctggcggggctggtgcgggcggcgctggtgttcctggacctgcaggccgcgctgccgcccggggacgacggcggggaccgactggcggcgtcggcgcccggcctggcggagcggttcctcagggccttccggccggcgctgtacgaggtgctggcgtcgacggcgacgacgtgcgaggcggacggcggcggcggcggcgacgactgcagcgtgtgcctggccgggttccgggcgagggccgtggtgaaccgcctcccctgcggccacctcttccaccgcgcctgcctcgagacctggctccggtacgagcgcgccacgtgcccgctctgccgcgcccacgtgcccctccccgccgacgagacgccgctgctccgctacccggagttcgagtga

SEQ ID NO: 97 - DNA, 849 bp, Zea mays
atgggctccccttcctccctccccgccgcggcggcgctcgtgctcctggccctgctcgccggagcccagtgccgcgaggcccagttcgacgccgcggacgccggcgcggagaacttcaacaccagcgaggccgccgtgtactggggcccctggcagaaggcccgggccacctggtacggccagcccaacggcgccggcccggacgacaacggtggtgcgtgcggcttcaagcacaccaaccagtaccccttcatgtccatgggctcctgcggaaaccagccattgttcaaggacggcaagggatgcggctcctgctacaagattcggtgcaggaaggacccgtcctgctccgggcggacggagacggtgatcatcaccgacatgaactactacccggtgtccaagtaccacttcgacctcagcggcacggcgttcggcaggctggccaagcccggcctcaacgacaagctccgccactcgggcatcatcgacatcgagttcaccagggtgccgtgcgagttccctggcctcaagatcgggttccacgtggaggagtactcgagccccgtctacttcgcggtgctggtggagtacgaggacggcgacggcgacgtggtgcaggtggacctgatggagtccaagacggcgcgcgggccgccgacggggcggtgggcgccgatgcgcgagtcctggggctccatctggcgcatggacaccaaccaccgcatgcagccgcccttctccatccgcatccgcaacgagtccggcaagacgctcgtcgccaggaacgtcatcccggccaactggaggcccaacaccttctaccgctccttcgtccagtacagctag

SEQ ID NO: 98 - DNA, 738 bp, Zea mays
atgtcgtcgatggccacgaagctcttcaacaccgccgaggtggagtcgtcggacgcgcaagccctagtcgcggacatgcggaaggctatcggcaccatgaagtccctcgccgtagacttcgagagggacggaaagtccgataaggtgaagaagcttgaggagacggttctggagttggtggcttcgtacgaggactgcgcggccatggcccaggcaattaaggcagtacctggagtgtatcagtcatctgatcagccaacggatttcaaaacattgatcggggtggaggctagcaagattagggaagcgtcatcggcatcacaacagaaccacccactctttcggcagttcagggagtctgtctggaatgttcaccatgctggtcagcctatgcctggtgaggaacaggaggacattgtcatgactagcactcagatgagcatcttaaatgtcacatgcccattaactggaaagcctgtgattgaattgatgaatccagttcgctgtgtggattgcaagcatatctatgaaaaggaccctgtaatgcaatatataaggaccaaaaaaccaccgcagtgccctattgcaggctgtcctagggtcctagaaagagggaaggttatctgtgatcccttcctccttattgagatcgaagagctgcgttcatcagagaccgccgctccgaatgccacaaacatagatgactggaccgatctaaatgacgaagacgaggagtga

SEQ ID NO: 99 - DNA, 996 bp, Zea mays
atggtggtgctcgccaaaccgcctgtcgtcgaccagatcccgctcctgcggtccccgggccccagggacagcttctcgggagtgccggtcgtcgacctgtccagccacggcgcggcgcgggcgatcgtcgacgcctgcgagcgcttcgggttcttcaaggtcgtcaaccacggcgtggccgcggccaccatggacagggccgagtccgaggccgtcaggttcttcgcgcaggcgcaggcggacaaggaccgcgcggggccggcgtacccgttcgggtacggcagcaagcggatcgggctcaatggcgacatggggtggctcgagtacctcctcctcgccgtcgacgccgcgtcgctctccgacgcctgccccgtgccctccagcgccgcgttccggagcgcgctgaacgagtacgtcgcggccgtgcggaaggtggcggcgcgtgtgctggaggcgatggcggagggcctgggcattgcggacgcggacgcgctgagctccatggtgagcggcgccgggagcgaccaggtgttccgcgtgaaccactacccgccctgccccgcgctgcagggcctgggctgcagcaccacgggcttcggcgagcacaccgacccgcagatcatctccgtgctccgctccaacggcacctccggcctgcagatcgcgctccgcgacggcgcgcagtgggtctccgtgccctccgaccgcgacgccttcttcgttaacgtcggcgactcgttgcaggtgctgaccaacgggaggttcaggagcgtgaagcaccgggtggtgaccaacagcctcaagtccagagtttccttcatctacttcgcggggccgccgctggggcagcggatcgcgccgctgccgcaggtgctggcggagggagaggagagcctgtacaaggagttcacgtggggcgagtacaagaaggccgcgtacaagacgaggctcggcgacaacaggctggcccagtttgagaagcgtagcaacatctag

SEQ ID NO: 100 - DNA, 996 bp, Zea mays; identical to SEQ ID NO: 99

SEQ ID NO: 101 - DNA, 978 bp, Zea mays
atggcggccaatgcgggcggcggtggagcgggaggaggcagcggcagcggcagcgtggctgcgccggcggtgtgccgccccagcggctcgcggtggacgccgacgccggagcagatcaggatgctgaaggagctctactacggctgcggcatccggtcgcccagctcggagcagatccagcgcatcaccgccatgctgcggcagcacggcaagatcgagggcaagaacgtcttctactggttccagaaccacaaggcccgcgagcgccagaagcgccgcctcaccagcctcgacgtcaacgtgcccgccgccggcgcggccgacgccaccaccagccaactcggcgtcctctcgctgtcgtcgccgccttcaggcgcggcgcctccctcgcccaccctcggcttctacgccgccggcaatggcggcggatcggctgggctgctggacacgagttccgactggggcagcagcggcgctgccatggccaccgagacatgcttcctgcaggactacatgggcgtgacggacacgggcagctcgtcgcagtggccatgcttctcgtcgtcggacacgataatggcggcggcggcggccgcggcgcgggtggcgacgacgcgggcgcccgagacactccctctcttcccgacctgcggcgacgacgacgacgacgacagccagcccccgccgcggccgcggcacgcagtcccagtcccggcaggcgagaccatccgcggcggcggcggcagcagcagcagctacttgccgttctggggtgccggtgccgcgtccacaactgccggcgccacttcttccgttgcgatccagcagcaacaccagctgcaggagcagtacagcttttacagcaacagcacccagctggccggcaccggcagccaagacgtatcggcttcagcggccgccctggagctgagcctcagctcatggtgctccccttaccctgctgcagggagcatgtga

SEQ ID NO: 102 - DNA, 2679 bp, Zea mays
atgatgcagcagctccgtcacagccagccgagcccgtgcctctgcggcctgcgggcggcacggcctatgctcgccctcggcgcagcagcatcccgttcgcggcccgccggaaaactgcaaccgagcgtctgcctcggcctcggccatgtagccccagccgcggcgagaggacagccccgtccccgtgccgttgccgactcggcgctgggagcatcgcctacgagcgtgcatgtcggaggcaagctgctgctgcagaacttcgccgccgacagccagcagcggctcaagctctccatccagcttgtcagcgccaccgtggccgatcccgacgggcgcggggtgaaggcggaggcgtcggtgctggacgccgtcgtgggcagcggggacagcgagctcgacgtggacctgatctgggacgaggcgctgggcgcgcccggcgcggtggtggtgaagaaccactccgacttccccgtgtacctgaggctgctgagcgtgccggccggcgtcggcggcgccgacgacgaggccgccgccgtccacttcgcctgcaacggatgggtgtaccccgtcgacaagcacccgtaccgcctcttcttcaccaacgacgcgtgtgtcaaggaagaaacgccgagcgccctgctcaagtaccgggaggacgagctcggcgcgctccggggagacggcgagacgacggagcgaccgttccagccgtgggaccgcgtgtacgactacgcgctgtacaacgacctggggaacccagacctgcgccaggacctggcgcgccccgtgctgggaggatcccaggagtacccgtaccctcggcgtaccaagaccggccgaccagccgccaaaacagatcctcggtcggagagcagagcgccgctggacgaagagatctacgtcccctgcgacgagcgcgtcggcttcgccagcatccccgcgccgacgcttccgccgctgggcgggcacttcaggtccctcgccgatgtctaccgcctcttcggcctcgacgacctcggccggctcccggaggccaaggcggtcatcaacagcggcgcgccgttccccgtcgtgcctcaggtcatttcagtgaacccgacacattggcggaaggacgaagagttcgcgcggcagatgatcgccggggcgaacccggtgtgcatcaagcgcgtcaccaagttcccgctggcgagcgagcttgaccgcggggtgttcggcgaccaggacagcaagataaccaaggaccatgtcgagaagaacatgggcggcatgacggtgcagcaggccgtagaggaggggaggctgtacgtcgtggaccaccacgactgggtgatgccatacctgaagcgcatcaacgagctccctgcgagcgaggagaaggcggaggtgtcgcagaggaaggtgtacgccgccagaacgctcctgttcctggacggcgaggactcgtcgatgctcagaccgctggcgatcgagctcagctcgccgcacccggagaaggagcagctcggcgcggtcagcacggtgtacactccaccggacagcggggacgacggcatcacggccgggaggttctcaacctgggaactggcaaaggtttacgcctctgccaacgacgcagccgagaacaacttcgtcactcactggctcaacacgcacgcatccatggagccgatcgtgatcgcggcgaaccggcagctgagcgtgctgcacccaatccacaggctcctcaagccgcacttccggaagacgctccacatcaacgccgtcgcacgccagatcatcgtcggctcgggtgaccagaggaaggacggcagcgtcttccgtggcatagacgaggtcacgtacttccccagcaagtacaacatggagatgtcctccaaggcgtacaaagcctggaacttcacggaccttgctcttcccaacgatctcatcaagagaggtctggcaaaaggagatccaaagaagccagagacggtggagctggcgataaaggactacccgtacgcggtggacgggctcgacatgtgggcggcgatcaagaagtgggtggctgactactgcgccatctactacgccgacgacggcgcggtggcgagggacagcgagctgcaggggtggtggagcgaggtcaggaacgtggggcacggcgacctggcggacgcgccgtggtggccggcgatggactgcgtcgccgacctcgtggagacctgcgccaccgtcgtctggctgagctcggcgtaccacgcgtccatcagcttcgggcagtacgactacctgggcttcgtcccgaacgggccctccatcaccacgcggccggtgccgggcccggacgccggggcggaggtcacggagtcggacttcctggcgagcgtcacgccggtcaccgaggcgctcggcttcatgtccatcgcctcggggccgatggggctcaagggcacggaggtgtacctggggcagcgcccggacacggagcagtggacgcgcgagcggagggcggccgaggcgctggcggagttccgggcgaggttggaggaggtcgcgggcaacatcgacaggcggaacgcggaccctgcgctgaagaaccggacggggcaggtggaggtgccctatacgctgctcaagccgacggcacagcccggactggtgctccgtggcatacccaacagcatcaccgtttga

SEQ ID NO: 103 - DNA, 726 bp, Zea mays
atgatcaaggcgaacccggacagcatgctgccgccgggattccggttccacccgacggacgaggagctgatcgtcaactacctccgcaaccgcgccgccaacacgccgtgcccggtcgccatcatcgccgacgttgacatctacaagttggatccttgggacctgccatccagggctgcgtacggggacaaggagtggtacttcttcagcccgcgcgaccgcaagtacccaaacggggtccggccgaaccgcgcggcaggatcgggttactggaaggccaccggcaccgacaagcccatccacggcagcgccaccggcgggagcgtcgtcggcgtcaagaaggcgctcgtcttctacaagggccgcccacccaagggcgccaagaccaactggatcatgcacgaataccgcctcgccgccgccgacgcacacgccgcccactcctactaccgctccatgaagtcccgtaacgcctccatgaggctggacgactgggttctgtgccggatctacaagaaggccagccacgtgccgccgatggcggtgccgccgctctccgaccacgagcaggacgagccctgcggattcgacgagaacccgtacggcgcgacgacgagcgccgccgtgctcctgcagggcgcgtcgtgcccggcgctgcaggccgcggccggcgtgcagaggatgcccaggatcccgtccctcacggagctgttcagtgacccctag

SEQ ID NO: 104 - DNA, 945 bp, Zea mays
atggcgggccaagtgatggaagctcaggcgtgccggctgcagcctcccaccatggcgccgttcgcgccactacctcatcagtacaacaacacctgcaagcacctcaacacgacgatggccgccacttccggcaacaacaacagcaacggcagcaccgctaccgcggctggcggtgcggcggccgacggcatggccgcctacctccagcacctgcagcaggcgggcgccgaggcggcggccaagagcggcggcggcggcggcgcggcgcgcggggagcagtgcccgcggtgcgcgtcgcgcgacaccaagttctgctactacaacaactacaacacgtcccagccgcgccacttctgccgcgcctgccgacgctactggacgctgggcgggtccctccgcaacgtccccgtcggcgggtccacgcgcaagcgcccgcgcctggcgcaccaccaccagcacgccaggctcgctcctccggcgccgcacgtcttcggcctcacgccgatgatgcctcctcccttgcaaccgtcgtcgtcgacatcgtcgtcgcagggacagggacagggacagggacagagcggcggcctcctcggctcactgttcgcgctcggcgccgcgggcgcggggccgccgctgctcgaaggccgcggcgcagggtcgtcgttcgacttcgacctcgggctcggactcccgacgggggccttacacctgggcgcggccggacaaatgcaaggcctcgggctcatggggggaggaggtgcctccgcagccgggtcgtcgtccttcctctggcccgccgcggggctgctggtggacaacgacagcgtggacacgtggaagatgccaggcgccgctgcgggttcaatgtggccagacttctcttttccggcggcagcggcgccacaaaccgccggattgcttcatggcggaggccacctgatgtga

SEQ ID NO: 105 - DNA, 864 bp, Zea mays
atgtgcatggtcgtgtcggcgtgcaggagggacagcttcatcacgcacagggccttctgcgacgcgctcgcggaggagagcgcgagggcggtgaccgcggcggcggcagtcgtcgtgggacagcagcaggccgctggagggggagatggcagcgcggggttgcacctgccgccggacgtgctggacccgtcgcagacgctgggcggcgggcacggcatgtccttgcaagagctgtgcctcaagagggagcagcagcagcagttcgccccgtcgtcgtggctgacggcgcaccatcagcaggagctgcccggatcggcgaggctgctagagcagcatgagtacatagggagctccacgccggagagcacggcgggcctcagcggcttcgtcgggctctcgccgtccgccgctggtgaagcggcggcctcggcgcacatgtcggcgacggcgctgctgcagaaggccgcgcagatgggtgcaacgctgagccggccgtcgaaccaggaacagatggcgagcactcacagtcacagcagcaccaccaatgctggcactggcagtgccagtgcggcagctgctgctgcaatcaacgtgcctggcactggcgctggtgccttcggctttggagcacctcatcacttcggagcggaggagaggaccaccaccagtgctgaccgggacgcctgcggcaatgccgccgccgtctcggtggtaggcgccaacgatggtttcaccagggacttcttggggctgagagccttctcccacggcgacatactcaccatggccggcttcgatccctgcatgtcgtcggcggcgtacgagcaagggcaccaccagagcagcaagcagtggcatgtctag

SEQ ID NO: 106 - DNA, 267 bp, Zea mays
atggccagcctcactgacctcgtcaacctcgacctgagtgactgcaccgacaggatcatcgccgagtacatctgggttggaggatccggcatagacctcaggagcaaagcaaggacggtgaaaggccccatcaccgatccgagccagctgccaaaatggaactacgacggctccagcaccgggcaggctcccggagaggacagcgaagtcatctccctcaagccattttcaaggacccgttcaggaagggtaacaacatccttgtga

SEQ ID NO: 107 - DNA, 2100 bp, Zea mays
atggcgtccgtgtacacggcgccgcgcgccccgctcccgacggtggcgtcctcctcgtcatccgcgcggcaggtggatccgaaccctagtggaagccgcttcctcgccgggcggcgcctccgcgtcgtccgccgcctcgccggcgcggccccgtcgcggcgcgctccgtgggtctgctactccgcgcgtagccccgacgcggacgccggcgatgagcaacgccggcggggttgggacgcgatgctccacgacgccttccagggtgccgtgcgacggtggagcgagtacgtcagcaattactggcccctaccgccctctgtgaaggaggcgggtacggggaagagggttgggagttcttacgatgaggaggtgatgaatggggatgaagaggagatgaaggttggggaggaagagggaaagtggagctgggagaggtggaagcggcattttgctctcattgaggagagcgagcgtctcgttgatgagctccagttgcaactccaggcgtctgtttatagagaagactacagaagtgctcataagctgaggctagctattgctactatagtgaaaaatgacactgtgggtagagctgtctctgacttaaatatggccatagatgaggaacgctacaaggatgcagcatatatcagagatcatgctggcacaggactgctggggtggtggtctggaatttccggaaatttgtccgatccatatggtcttataattcgtataagtgctgaacatggtcgatatgtggcaagaagttatgatacaagacagctgacttctgacagctctggtctccctatatttgaaatatactttgcagaggcaaatggtggatacaacctgcaggcagtgcatctgaaaccagatgatagtgattctgaccaagtgccaaacatgttaagggagaaacttggcatggacagtataaatatatctagcagttcagtagggtctaagcatgaagaattcgatggaagtgtaaacatggatgataaagatagtgatgatagcaacattgatgctggccctggttcgaaagacttgtcaagcgatccaactgcagttcccaggattaaaatcttgaaagtggtacccatgcagaatgttgacaaagactacataatcaatatttttgatcagatttcagaggaaaatgatgatcctgaagttgaaaatgaatcttcagaagatgctggtgatgaagataacagtggagtagcagaaacagtttctgcagaagagaacggtgatgaatctggtgacgaaagtgatattgaacccttggtttcaattgattttgtcattgagaataacgatgactatgcttctcatccatctgctgaagcttttgaacgaatgccagctagattagaaaaaagagaccgcttctcgttttccttctatactgaagaatatagtaaaaaactagatgctggaaaggcccagcagacttcaaagaaaacagttcgtttgcataccgatcagcaggattatgatggttttgttgagcttgatcgtgtaaagttgagcggcagcaacaaaaaactttcgatactacaacttggcatcaaacgaaataacaaggttcagaaaaaactgcatggagttacccactttagtcgtattcagatgcctatatcttcagatcctcttaccggcttatatttgaccgcatcaggatttgactcagaaattcttagtttacaacgaaaatttggtcaatggcgggaggatggtccatctgaggagcatagtgacctattgttctatgagtatgttgaagctgtaaaattaacaggggacaacctcatgccagctggtcaggttgttttccgtgcaaaagttggtgaacactatcggctccctcataagggaattatccctagagaacttggagtgattgctaggtacaaggggcaaaggaaaattgcagatcctggtttccaaaaccctcaatgggttgacggggagcttttgatactagatggaaagttcatcagagatggtcctgtgatagctttcttttactggacatctaatgttcatcttttcgaattctttagacagttgaagcttcctgactag

SEQ ID NO: 108 - DNA, 3882 bp, Zea mays
atgacctatctacctcttctagaaaaccctccaagcgcggccaaaaacattcaaagtgaaatcgcctcctcccttgggagaactcatgcaaacccagcagaagggggcaatggtctgaaatcgtggaccaacaatgatgatctgcggaaagatgctgcagaagcgctctgctgcctcgcacatgcccttggagaagactttactatcttcataccatcaatacgcaaaattcttgtgaagcaccacttgcggtacagaaaatgggatgagattgaaaatcggctactgaggcgagagctactcatcactgaaaacttgtctgtgcaaaagtacacacaatgtccacctgatgtcattagagacccccttgatgattgtgatggtacaccttctgagatagctgatgatacacagcgacaagcaagaagtcatcaagtcaatgatgtccggttgcggagtgccggtgaggcttctcaaaggagtactagggaagactgggctgaatggatgagacatttcagtattgcgcttctcaaagagtcaccatctccagctttacgcacctgtgcaaggctagctcagcttcaggcagaatttatggaacatgatgagaagccacttcctattgatacaagactgcttggtgcacttgctgagaagtgtcgagcatttgcaaaggcactccattataaagaaatggaatttgaagctgtgtgcaccaagaagatgggtgcaaatcctgttacagtggttgaatcccttattcatattaacaatcaactacagcagcatgaggcagctattggcatattgacttactcacagcaaaattcggaagttcaattgaaagaatcatggtatgaaaagttgcaccgttgggatgaggctcttaaagcatacaccgtgaaatcatctcaaacatctggtccctttacaaaacttggatgctacattaggtcgaatgaggtgtctagcagctttggctcggctgcaaatgctgcttggcatatgggtgagtgggaccatatggcagactatgtttctcgcctggatgatgcagatgaaaataagctccgtatgttgggtaacgcaacagctagtggtgacggaagcagtaatggtgctttcttccgggcagttcttttagttcgttacaaaaagtatgatgacgctcggatgtatgttgagcgagctcggcggtgtttagctacagaacttgcagcactggtacttgagagttatgagcgagcgtataataacatggtgcgtgttcaacaactttcagaactggaagaggtgattgattactgcactcttcccatggaaagcccgattgctgacggacggagggaacttattcgcaatatgtggaatgaacggattaaaggaacaaaacggaatgtcgaggtgtggcaagccctacttgctgtcagggagttggttcttccccctaacgaagacagagacacctggataaagttcgctgaactttgctggaagaacggtcgtattagtcaggctagatctacgttagtcaaacttttacagtttgatcctgaatcttcccctgaattgacactgtatcatgcacatccacaagtagctctggcttatctaaaataccagtatgcagttggtgatgagcttaaaaggagggatgcattttctaaactgcaagagttgtctgtgcaggttgctaccaccatgggcaatttacctggaacatcagcaaaccatggcaccatgtcaaatgctggagtaccactcattgctcgtgtctacttgacacttggtagctggaagaaggcactatcacctgcattagatgacgattccattcaagaaattttgatttcttaccataatgccacgctaagtgcaaaggactgggggaaggcctggcacatatgggctttgttcaacacagaagtcatgtcacgctatactttccgaggccgaccagatattgctggaaaatatgttgttgcagcagtaactgggtatttttattctattgcttgtgcatctactacgaaaggggtcgatgatagcttgcagctttactttgaccaaaggaaaaataactcggccggggagggaaagaccgccctcccggatatccttcgtctgttaactctttggttcaaccatggggatacctcagaagttcaaacagcgttgcagaaaggtttttcccttgtcaagattgagatgtggctggttgtgctgccccagataattgctaggattcattcgaacaatagagtagttagagaactgatacaatctttgctagttcgaattggaaaggggcatccacaggctttgatgtatcctctcttggttgcctgcaaatcaataagtatattgagacaacgtgcagcgcaggaggtcgttgataagatccgccagcacagtggaggtcttgttgaccaggcacaacttgtgtcgaaggaactgatacgggtagcaattttgtggcatgaaatgtggcatgaggcactcgaggaagctagcaggatgtattttggtgagcacaatatcgaaggaatgcttgctgtacttgagccattgcatgcaatgcttgagaggggggatgagacaattaaagaaaatgccttcattcaggcttatgggcatgaattactggaagctcatgaatgctgtttgaaatatcgggctacaggagaggatgctgagctaactaaggcctgggatttgtattaccatgttttcagaagaatcgacaaacagcttccaagtcttacgaccctcgatctgcactctgtttcgcctgagctactcaaatgtcgaaagttggaacttgctgtgccaggaacttatgctgcaggccacgaagatttgcggcaagatgaacgagtaatgcagctttttggtttggtgaatactctcctagagaactcaaggaaaacatcagagaaggatttatcaatccaaagatatgctgttatacctttgtcacctaacagtggtttaattggatgggttccaaactgtgacacacttcatgctctgatccgtgaatacagagatgccaggaagattttcttgaatcaggagcacagacttatgttggcttttgcacccgattatgatcacttacccctcattgcaaaggtggaagtgtttcagcatgctttgcaaaatactgagggaaatgaccttgcgaaggttctgtggctgaagagtcgaacttcggaagtatggcttgagcgccgcacaaactacgctagaagcctggctgttatgagcatggttgggtatttgcttggtttaggagatcggcatccaagcaaccttatgttagatcgctatagtggaaaaatattacacatcgacttcggagattgctttgaggcttcaatgaatcgagaaaagttccctgaaaaagtaccattccgtttgactcgaatgcttgtgaaagctatggaagttagcggtattgagggtacattccgaacaacttgtgaaaatgtgatgcaagtccttcgcacaaacagagacagcgttatggccatgatggaggcatttgtacatgacccgttaatcaattggcgtctgttcaatttcaatgaggttcctcaagtgtcgaactatggtaatgttcatgctcacacggttgtcagtagtgaagaagcagtggctaaccgagagctcatgcaacctcagcgaggagcacgtgagagggaactgctacaggctgtcaatcaactcggtgatgccaatgaggttttgaatgagcgtgctgtagctgtgatggcacggatgagtgacaaactaacagggcgtgacttctcttctgggtcagctttggctggagcaggtggtgtccgttctggtgagctctcttggaaacagtag

SEQ ID NO: 109 - DNA, 1074 bp, Zea mays
atggccagcctcaccgacctcgtcaacctcgacctgagtgactgcaccgacaggatcatcgccgagtacatctggattggaggaaccggcatagacctcaggagcaaagcgaggacggtgaaaggccccatcaccgacccgagccagctgccgaaatggaactacgacggctccagcaccgggcaagctcccggagaggacagcgaagtcatcctctaccctcaagccattttcaaggacccgttcaggaagggtaaccacatccttgtgatgtgtgactgctacacgccacaaggcgagccaatccccaccaacaagaggtacagcgccgccaaggttttcagccaccccgacgtcgcagctgaggtgccgtggtacggtattgagcaggagtacaccctccttcagaaggacgtgagctggcccctcggctggcctgttggtggataccctggtccccagggaccatactactgcgccgccggtgccgacaaggcctttgggcgcgacgtggttgacgcccactacaaggcctgcctctacgccggcatcaacatcagcggcatcaacggcgaagtcatgcctggacagtgggagttccaagtggggccgtccgttgggatctctgccggcgacgagatatgggtcgcccgctacattctcgagaggatcaccgagatggccggaatcgtcctctccctcgacccgaagccgatcaagggcgactggaacggcgccggcgcccacaccaactacagcaccaagtcgatgagggaggccgggggatacgaggtgatcaaggcggcgatcgacaagctggggaagaggcacaaggagcacatcgccgcgtacggcgagggcaacgagcgccgcctcacgggccgccacgagaccgccgacatcaacaccttcaaatggggcgtggcgaaccgcggcgcatccatccgcgtcggccgcgacaccgagagggagggcaagggctacttcgaggaccgcaggccggcgtccaacatggacccctacgtcgtcaccggcatgatcgccgagaccaccatcctgtggaatggaaactga

SEQ ID NO: 110 - DNA, 2013 bp, Zea mays
atggatctactgagacaccccttcaagggagttgtcactgatatcaaaggaagggccacttggtacaagcatgattgggttgcaggactccactctggctttaggatattggcacctaccatgtatatcttctttgcctctgctctccctgtcattgccttcggagcacaactgagcacggcaacaaatggaatactctcaacagttgaaacactggcatcgactgcgatatgtggcatcatacattcaattcttggagggcagcctttgttgattgttggagttgccgaaccaactattatcatgtacacttatctctacaattttgccaagaatcatcaagctctgggtgagcagctatatttggcgtggacaggatgggtctgcatctggactgccatcatgttgtttcttttggcaacgttcaatgcttccaacgttattagcagatttacaaggattgcaggagaactttttggcatgttaatcactgttctcttcttgcaagaagctatcaaggggatgataagtgaatttagtgtgcccgaagacgctgacagcagttcaccaatataccaattccagtggctctatgtcaatggcctactcggtgtcatattttcaattggcttgctgtacactgcattgaggaccaggcgagcaaggtcatggctctatggcacagggtggtttagaagcttcatagctgattacggcgtcccacttatggtgattgtgtggacaggattgtcgtatttacatccaggcaaggtgccttcaggagtccccaggaggctttcttctccacttccctgggagtcaagttcactgggacactggaccacagcaagggatttgttttctgtccctccagcatatatatttggagccattctgcctgcttttatggttgcaggactttacttctttgatcacagcgtagcttcacagttggcacagcaaaaagagtataatttgaagaagccttctgcctaccactatgacattttggtccttggattcgtggtcctgctctgcggtttgcttggtatccctccatctaatggagtgcttcctcagtctcccatgcacacaaaaagtcttgctgtccttaagaggcagttgctaagcaaaaagatggttgatactgccaaggagagcataggaggaagtgctaccagtttggaaatatatggcaagatggaagaagttttcatcaaaatggatagcgaacagaatactgattctgttgacagggagttgaagaacttcaaggatgctgttctgcaagaaggcgacgaagaagggagattggctagagaatttgaccctcgcaaacatatagaagcccacttgcctgtccgagtgaacgaacagagactgagcaatctgctgcagtccatactggttggtgggtgtgttggagctatgccagtcatcaggatgatacccacatcggtcctctggggttactttgcctacatggccatcgacagtctaccagggaatcagttctgggagaggatacagcttctgttcattacagaaagccgacgctacaaggttcttgaaggtccccatgcatcgtttgtggagtcagtggttcccaaaacagtaaccatcttcacgatcttccagttggtttacctcctaatatgcttcggcataacgtggataccgatagccgggatcctgttcccagtgcctttcttcctcatgatcgtcatcaggcagtatctcctcccaaaattttttgatcccgtcgtcttgagggagctcgatgcagctgagtacgaagaacttgacggggtcccccttgaacacaaactggaagatgaagcatctgaagtaggaagttgtcctagccgtcctgatgcggagatattggatgaactcacgaccaaccgcggagagctgaagcacagaagttctagcctgcgtgaagaaagaccaattcaagtgacagtgagcacgcatatggttgcttcaagtgcggttcagccaagcctgtga

SEQ ID NO: 111 - DNA, 3741 bp, Zea mays
atggggcacagctctagaaagaaaaagaagcgcggcgcggccggccgcaaggcagccaaggaccacgccgcgcagctcgaaggagacgagaccgccctcgacgaggagctcacggccctggcttcaattttaggggaggacttcaaagtaacatcagaatcacctcatacacgatgtaatatatgtattaggccttattcggatgacatgggctttgaagatctaaatatttcagctattcttattgtgatatgttttcctggttacccccacaagtgtccaaagttgcggatcctgcctgaaaaaaacttgtctaaagaagatacagatcggctcctttcgcttcttattgaccaggcaaacatttattcccgagaaggacgtgttatgattttcaatttgtttgaggctgcgcaagagtttctatctgagattgctccagctcgtgtttcagtgagcactgcttctttcttgggtttgagctcaactactgatgacaatgtggaagttggctttgacagtgatccttacctgggaatctcttacatatataactccttcgatctatatagtcagttatatgatgatacttattggagtcgacaaggttcagatctgacaacagatagtggcaggaaaaatattgtatctcaagttcaatccaatgttagaagcaagaggaagaccatcattgaaaaatcccacatctcagctgataaggtcaataatgctaaagagtcatctggtgataaagctgaacagcaacatgccacaaagcatggtgccatacgggaggcagctccaactttacatgttgtggatgaggaaactgaaatttacggcaaaagtttgtctgctagcaatacaggaaatacatcagatactcctgaaaggggttttagcagtctaaatgaacctgaggacactgaccttgcagatgaatcttggaatgaacaagattgtgattcggacttcagctcttcaaatgcactaccttatgtttcatacatgttagatgatgcttcacgaaacaagaaaagggatttagttctggtacatctgcttcggatagcctgtgcgtcgaaggattctctttcaagtgctttgccaacaatatcagcagagttgtgcaacataggggttctttccgaatgggctaaggatttaatttctgattctcctgctgtttttggagaaactttcagtcatgtttttgggcaacaaatgatctcttcagagtgttctctattttggagacctgataattcatcatctaagccaaattctcgttatttgaatgattttgaggagctccgttcacttggtcaggggggctttggtcgtgttgcattatgcaaaaacaagctagatgggcgccaatatgctgttaaaaagatacgtctgaaggatagaagtcctcaattgaatgagaagattttaagagaggtagccacactttcaagattgcaacatcaacatgttgtccgttattaccaggcatggattgaaactgaatacggtcatcataatattttgaatgctggcgggtcctgcactgctgagagctctatctttagttatgatgaagtcagcctatcggatgcaggtggtgggaataagcaggaatccacgtacttgtacattcaaatggagtattgtcctaggactttgcggcaggattttgagacatacatctcgtcttttgatgttgaccatgcctggcacctgtttcgacaaattgtggaaggtctagctcatgtccatagtcaaggaatcctacacagagacctgacacccagcaacatattttttgatgtccgcaatgatattaaaattggagattttggtttagccaaatttctgaagctggagcagctagatcatgaccaatatcttcctactgaagcactgggtgtatcaatggatggaacaggtcaagttggtacatatttttatactgcaccagaggtagagcagaaatggccacagattaatgaaaaggttgacatgtacagtttgggagtaatattttttgagctttggcatccatttgccacagcgatggaaaggcatcttgttctttccgatcttaagcagaagggagacccgccattgtcatgggaatcaaaatttcctcgtcagtcagtcctgttaagaagcttgctgtcaccaagcccgtctaaccgtccatctgctgtcgaggtcttgcaaaatgaactgcctcctcggatggaagatgagtggctaaatgatgtacttagaatgatacggacaccagaagacacatatgtttatgaccgggttatatctacaatatttaatgaggacaggttcgccaaaatgcaaggccaacatgatagcagcaaaaagtccactggtaacattgataacagtgaacttttggataccatcgttgaggttgccaaggaggttttcaagcggcattgtgctaaaaggttccaaatatcacctttgcatactttggagtggaattttaccaaaaacaggggaaacacagtgaaaatcttaactcaaggaggagagatgctagaactttgctatgaactgcgaacaccatttgttatgtcaattgcttctaatcagacatcatcattcaaacgttatgaaatatcatgggttcatagaagagccgttggccattcaactccttatcgttttcttcagggtgattttgacattattggcggtacttcaccgattccagaggctgaaatcatcaaggtggctttggacctggggacccgcttttatgattccaagacgctagtcatacgtctgaatcacggtaaacttgctgaagcaatttgctcttgggcaggggtttctcaggatcaaagacaaaatgttgctgagtttctgtcttcaactattgttcagtattggccaaatgaagctgaccgcaagtcacagtggagtttgattagggggcaacttttacaggatcttcgtctttctgaagaagttgttgagaagctacataaagcagatcagcggttttgtggctctgcagatctagtacttgctagattaagagggaccctgttttatgatgaatctgcttgcaaggctcttgatgatctatccgcgcttctgagatgtttgagagtatggtcggtagaacaaccaattactactattgatgtactcatgcctccgtcagaatgttactatacaaatttgtttttccaggtatactcaaaagaaggtaatcatggaccgggtttccatgaaaagttgctggcagttggtggacgatatgattggttggtggaacaagcttgggatgagacatctaaatctaaacccccaggtgctgttggtgtgagcattgcacttgagaaatttcttcctaacaatccttcatctgatctgggattgcgaagggttgaacctagcatcagtgtacttgtctgttcaaggggtggtggcggtctgttgactgaacgcatggaacttgtcgcagagctttggaaagctaacataatggctcagtttgttcctcaggaagatccaagtcttcaagaacagtatgaatatgccagtgaacatgatattaaatgccttgcaattatgactgaatcaggcctgtcacaaacagaccttgtgaaggtccggcatcttgattttaaaaaggagaaggatgttgaaagagagggactaataaagttcctgtctgatgcaatgtgttcacaatacaaaaatcctacgatctggagctga

SEQ ID NO: 112 - DNA, 954 bp, Zea mays
atggcggccacggtttcctccttcccggtggtgaacatggagaagctggagacagaggagagggccacggccatggaggtcatccgcgacggctgcgagaactggggcttcttcgagctgctgaaccacggcatctcgcacgagctgatggacgaggtggagcggctgaccaaggcgcactacgccaccttccgggaggccaagttccaggagttcgcggcgcggacgctggaggccggcgagaagggcgccgacgtcaaggacgtggactgggagagcaccttcttcgtccgccacctcccggcctccaacctcgccgacctccccgacgtcgacgaccgctacaggcaggtgatggagcagttcgcatcggagatccggaagctgtcggagaggctgctggacctgctgtgcgagaacctgggcctggagcccgggtacctgaaggcggccttcgcggggtcggacggcccgacgttcggcaccaaggtgagcgcgtacccgccgtgcccgcgcccggacctcgtcgacggcctccgcgcgcacaccgacgccggcggcatcgtgctgctgttccaggacgaccaggtgagcggcctgcagctgctcaggggcggggagtgggtggacgtgccgcccatgcgccacgccatcgtcgccaacgtcggcgaccagctggaggtcatcaccaacgggcggtacaagagcgtcatgcaccgcgtgctcacgcgccccgacggcaaccgcatgtccgtcgcgtccttctacaacccgggcgccgacgccgtcatcttcccggcgcccgcgctcgtcggcgccgccgaggaggaccgcgccgaggccgcgtacccgagcttcgtgttcgaggactacatgaacctgtacgtgcgccacaagttcgaggccaaggagcccaggttcgaggccatgaagtcggccatcgccaccgcgtga

SEQ ID NO: 113 - DNA, 753 bp, Zea mays
atggcgaagaattacccaaccgtgagcgccgagtacagcgaggccgtcgagaaggccaggcgcaagctccgcgccctcatcgccgagaagagctgcgcgcccctcatgctccgcctcgcgtggcactccgcggggacgttcgacgtgtcgtcgaggaccggcggtcccttcggtactatgaagtgcccggcggaactggctcacggcgccaacgcggggctggacatcgcggtgcggctgctcgagcccatcaaggaggagttccccaccctctcctatgccgatttctaccagcttgccggagttgtggccgtcgaggtcaccggtgggcctgagatccccttccaccccggcagggaggacaagcctcagccgccacctgagggccgtcttcctgatgccaccaagggttctgaccacctgaggcaagtctttggcaagcagatgggtttgagtgatcaggacattgttgccctctctggtggccacaccttgggaaggtgccacaaagagcggtctggttttgagggggcctggactacgaaccctttggtctttgacaactcttacttcaaggaacttctgagtggcgacaaggagggccttcttcagctcccaagtgacaaagccctgctgagcgaccctgtcttccgccctcttgtggagaaatatgctgcagatgagaaggcattctttgatgactacaaagaggcccacctcaagctctccgaactggggtatgctgatgcttaa

SEQ ID NO: 114 - DNA, 1458 bp, Zea mays
atggtgagcatgatcgccgacgagaagccgcagccgcagctgctgtccaagaaggccgcctgcaacagccacggccaggactcgtcctacttcctggggtgggaggagtatgagaaaaacccatacgaccccgtcgccaaccccggcggcatcatccagatgggcctcgccgagaaccagctgtccttcgacctgctggaggcgtggctggaggccaacccggacgcgctcggcctccgccggggaggcgcctctgtattccgcgagctcgcgctcttccaggactaccacggcatgccggccttcaagaatgcattggcgaggttcatgtcggagcaacgtgggtaccgggtgaccttcgaccccagcaacatcgtgctcaccgccggagccacctcggccaacgaggccctcatgttctgcctcgccgaccacggagacgcctttctcatccccacgccatactacccagggttcgaccgtgacctcaagtggcgcaccggcgcggagatcgtccccgtgcactgcacgagcggcaacggcttccggctgacgcgcgccgcgctggacgacgcgtaccggcgcgcgcagaagctgcggctgcgcgtcaagggcgtgctcatcaccaacccttccaacccgctgggcaccacgtcgccgcgcgccgacctggagatgctggtggacttcgtggccgccaagggcatccacctggtgagcgacgagatatactcgggcacggtcttcgcggacccgggcttcgtgagcgtcctcgaggtggtggccgcgcgcgccgccacggacgacggcgtcgtcggcgttgggccgctgtcggaccgcgtgcacgtggtgtacagcctgtccaaggacctgggcctcccggggttccgcgtgggcgccatctactcgtccaacgccggcgtggtctccgcggccaccaagatgtcgagcttcggcctggtgtcgtcccagacgcagcacctcctggcgtcgctcctgggcgacagggacttcacgcggaggtacatcgcggagaacacgcggcggatcagggagcggcgcgagcagctggcggagggcctggcggccgtgggcatcgagtgcctggagagcaacgcggggctcttctgctgggtcaacatgcggcgcctgatgcggagccggtcgttcgagggcgagatggagctgtggaagaaggtggtcttcgaggtggggctcaacatctccccgggctcctcctgccactgccgggagcccggctggttccgcgtctgcttcgccaacatgtccgccaagacgctcgacgtcgcgctccagcgcctgggcgccttcgcggaggccgccaccgcggggcgccgcgtgcttgcccccgccaggagcatcagcctcccggtccgcttcagctgggctaaccgcctcaccccgggctccgccgccgaccggaaggccgagcggtag

SEQ ID NO: 115 - DNA, 1458 bp, Zea mays; identical to SEQ ID NO: 114

SEQ ID NO: 116 - DNA, 921 bp, Zea mays
atgctgctcccacactcttcgtcagcctctgcaactgctaccactcgtgggctagcactagcagcagcagcaccgccgccgcgtccgaccgctcgcccccggcgcgcacgcctcctgcctccacgcgcgcgggccgagacgcatgcgacgggcgttggcgccgaccgcgcggccgaggcgcttctccagagcgggctgcgccgtgagtcgctgccgcggcacgtcgcggtggtgatggacgggaactcgcggtgggcgcgcgagcgggggctgacgcccgcggacggccacaaggccgggggccgcaacctggagcgggtcgttgcgctgtcgcgcgcctggggcatccgcgcgctcaccgccttcgtctgctcccgcgagaacttgagccgccccaaggccgaggtcgactacatgatgggcttgtccgagtggctgataggcgacaacatcgacaagctctcgaggcaggggatccgactgcaggtgatcggcgacgccgcgaagatgccagcctctctgcggagcgcagcggcgcaggccgacgaggccacgaggcaaaactcgcagctgcacgtgatgctggccatctgctacagcgggcgatgggacatggtccaggcgtgccgggagctggcccgggaggcgcaggcgaaccggctcagtccggacgacatcgacgagtcgatcatcgccggcaagctcgcgacgagcgccgccggcgagttctcctgtcccgacctggtcatcagaaccagcggcgagatgaggctcagcaacttcttgctatggcagtcggcgtactcggagttgttcttcaccgccaagatgtggcctgactttggggaggctgagtacctggaagcgttgcgctccttccagggcagagaccgccgcttcggccaatcaaaattactctaa

SEQ ID NO: 117 - DNA, 1617 bp, Zea mays
atgggccgatggttgggaaaacggttgtggcagattggggaccagcggccacgtggggtggggcctttggcagtagcgcgggtcaaaggaagggccgcgacagcggcacaggttggagaggaggccgctacgctggctagacgggaggcggtggtgctggtgaggccggccgcaccaagcgttgcaccgacgacgagtctgaagccaacaggagcacgagcgttggggatgtggctgtcgttcgtggtggagggaggggtggaatatggcaaccaaggagtcggtgtcgtgtctcagcaactatacaagtcacttacaagcctccagatgggcaatgtggaggactggatgggagacaattcacgtgatgatttaaacagagaaacaaatcggtccaggtgtcagtgtcactggcacagtgggtggtatggtacccagggaaaggcaagtgcgtcgtaccctgtacacgcaggctggcacagtgggtggtatggtaattggtacccagggaaagtctctcccagttccaggctccagcagtcactcagagccagaggagagaattcaaattcgcagcgcagcgccctcattttgtcattacgttgctctgctcctggctcacctcaccagcgatcactaccggagcaggccatgaagcttaagatcaacaaggcatgcgacctcggctccatctccgtcctccctccccgtaggaccggtgggagcggcggcgcaggaggggcgggttcctccgccgcgcccgtggcggcggggtcgcagcagaggtcgcagccgatgtcgcagcactccttctcgcagggcgttgtggggagcggcggcgcgtcgtcgctcctgcactcgcagtcgcagctctcgcaggcctccctcgacgagaatctcctcaccctccacctcgcctcgcccgctcgcgatcagagattcgggttccatgacgacttatcaaagaagatgacatcgttgcctgtcagctcggcttcttgtgtgcgagaagaatctcagctgcaactggcaaaaacatcaagcaaccctgtccatcgatggaacccttctcttcctgacggtagaagtgtgggtcctactgaggatgttgagcgcaaatttcagcatatggcaagttcagtgcataaggtagggatggtgcttgattcagtgcaaaccgacgttatgcagctaaacagagccatgaaggaagccacactagattctggaagcatacagcaaaagattgttctcctagacgctttgctgcagaaaaatcttaagggacaagatgatctcaaagctcttgttgagagcaacaccaaaagcatctccgatcagctgactgttctgaactcctactccaacaaactggatgagatatcctcaaccctttcaatcttgccaaaacaaatagaaacaaatttgaagcaacagcagagtgacaccttccgaatttttagaaaagacatggaggagattgttagagctgttagatctctcaacaataagattgatgcaatccaaatgccaacagtacgtatcattctatacttagcaagtcaaagttccatcggtatctcatctcttagtttctatgtttttcatcttgattga

SEQ ID NO: 118 - DNA, 558 bp, Zea mays
atggtcgggaccgggaagagggagcggatagcgatacggaggatcgacaacctggcggccaggcaggtgaccttctccaagaggcggcggggcctgttcaagaaggccgaggagctctccatcctctgcgacgccgaggtcggccttgtcgtcttctccgccaccggcaaactcttccacttcgccagctccagcatgaagcaggtaatcgatcggtacgactctcattccaagactctccagaggtccgaaccgcagtcgtctcaactgcagtcacatatggatgacggcacttgtgcaaggctaaaggaggaacttgctgaaacaagccttaagctcaggcagatgagaggagaggagctccagaggctgagcgtcgaacagctgcaggagctcgagaagaccctcgaatccggcctcggctctgtactcaaaaccaagagccaaaaaatccttgacgagatcagcggtctggaaagaaagagaacgcagctgatcgaggagaactcaaggctgaaggagcaagtaaatccctgctctctctcccccaccttctga

SEQ ID NO: 119 - DNA, 558 bp, Zea mays; identical to SEQ ID NO: 118

SEQ ID NO: 120 - DNA, 2376 bp, Zea mays
atggtggtcattcagggtggaattggtcctgctggcttatccgctgaggaccttcatgttcttgatcttaaacaacaacgaccgcgatggcatagagtggtggttcaaggtcctggtccatggaaaacgacccctggcagatgtatggcccttgatactacggccaagccatatgaatggagaaaacttgaaccggaaggtgaagggccaccaccatgcatggagatggagacggaggtgagtgcgcgggacgttatggccatgaaggatcacatagatctcgaggcctcgcagtcgcagcagcccaggaagctaccgcccaaggacctcaaggagatcgccgggagcttttggcttgtcgcctcgatgttcagcaagaagtggcagaattggaggggcaagcaatacaactttggagaatgcaagttgtgtttctgcctctcagccagtgtagctatatctgatttaaatcatactctgttacagggttccacaaatgttggaaaatctgcatttatcagtgcaatgctaagaacaatggcgtacaaggacccggtggcagcgacagctcaaaaatacaagccaatacaatctgttgttcctggaacaacccttggccctattcaaattgaatcatttttaggcggagggtggcatctggcatgtgaaccagttgagccagtccgccgaggcagcgccgcagcggtcccggaccagaggatgctggccgccgtcgcgtccagaacccgcaacaaatcggccaccaccgtcctctcccttgctatgccattcctcctctccgccgccagcgccagcaccaccaccaaccctcatcctctctccccgttccctcgcagccagaacaatagccgcgtccaccgcctgcaacttccggcacgccgcctccccagcttccccgcggttgctccgggcgcttcctttgctcccctcccgcagaggctaggcatggcgtcgctggcggcgtcagcggccgccgcggcggaggtgacgcacctcacgcagcgcgacgcggcggagatcgacgagcagctcatgggcccgctcgggttcagcgtcgaccagctcatggaacttgctggattgagcgttgcggcagcccttgcggaggtttacaagttgaatgaacatgcaagggtacttgttatctgtggcccaggaaataatggtggtgatggtctggtagctgctcgtcatctttatcactttggatataggccatctatttgctacccaaaacgcacacccaaacctctatattctggtctcgttactcagcttgaatcactgtcgatcccattcatacctgtcgaagacctacctaacgaattaccacgggagtttgatgttattgttgatgcaatgtttggtttctcatttcatggaacacccagaccaccctttgatcatcttatccaaatgcttgtttcattgagtgatattcaaaatccagataagcgcccagcaattgtttctattgatatcccttctggatggcatgttgaagagggagatgtcgatggaggcattaaacctgatatgctggtgtcattgactgcacctaagctctgtgcaaaaaagttcactggcccacaccattttcttgggggaaggtttgtccccccacctattttaaacaaatacggacttcagcttcctccttaccctggcacatcaatgtgtgtgagaattggaaaagctccatctgttgaaatttcatctctcagggagaactatatttcccctgaacttcttgagagtcaagtgatgtctgatccatttgatcagttccttaaatggtttgatgaagcagtaacagccggtctgcgtgagcccaatgcaatggctttgacaactgccaacaaggaaggaaaaccttcttcgaggatggttcttttaaagggagttgataaacagggatttgtttggtatacaaattatggtagccggaaggcgcatgacttgtgtgaaaaccctaacgcagcactccttttctactggaatgagatgaaccgtcaggtaagagttgaagggtcagttgagaaggttccagaagctgaatcagataaatatttccacagccgcccacgtggaagtcagcttggtgccatagtcagcaagcagagtactgtaattgctggaagagaagttcttcaacaggattacaagaaattggaacaaaaatattctgatgggagcttgattccaaaacctgaatattggggtggctacaaattgacaccgacactttttgagttctggcaaggacaacagtctcgactgcatgaccggttacaatactcgcagagagaagtagatgggagcacagtgtggcacatcgagaggttgtccccttga

SEQ ID NO: 121 - DNA, 1176 bp, Zea mays
atggcggaccagcagcagccacagcagcagccgcaggagatggacgttgaccgtaccggtggcctcgaactgcctccagggttccgcttccacccgagcgactttgagattatcaacgactacctcacgaagaaggtgcacgacagggactacagctgcatcgccatcgcggacgccgacctaaacaagaccgagccatgggacctcccgaaagttgcaaagatgggcgagaaggagtggtacttcttctaccagaaggaccgcaagtacccgacggggctgagggcgaaccgggccactgaggcgggttattggaaggcgaccggcaaggacaaggaggtctacaacccctttgcagcggaagggctgctgctggtcggcatgaagaagacgctcgtgttctacaaaggcagggctcccaggggtgacaaaaccaactgggtgatgcacgagtacaggctcgaaggcagcggtaggctccctgctagtcctgcatccgcatccggctcagccaccaacatcgctgcggccatgatgaaagcttcagcttcggcttgcaaggatgagtgggtggtctgtcgtgtgttcaacaagaccaccgggatcaagaagacggctgcgccggcataccaggtggccatggccggtcctgagatggatcagaatcagaacaacattccggccatccccatccccatgccgctgcagctgccactgcccgtgcccatgcagatgcaatttcccatcctgccagattttgccatggacccggtggccccctactaccccaacccgaatgccggcgcggggatgatgccgcctatggcattggcaggtatgggtggcgccggcgggctccagatcaacggcgctctgttcggcaatccggtgcccgcgccgctgccgatgaacttctaccaccaccagatgggcatgggggcagcagctggccaggtggacatgggggcagcggctggccagatggacatgggagcagctggcgctggcgctggcggcttcgacgttgcagcgccggagagtaggccgtcctcgatggtgtcacagaaggacgaacaggctaatgccgccgagatctcgtcgatgatgtctgtgaccggcccagggtccgcgaccaccaccatagagatggatggcatatggaagtacaagtactga

SEQ ID NO: 122 - DNA, 597 bp, Zea mays
atggccaccggcccgcgatctctccacgccctcctcggcggcggcgcagtcgccgacttgctgctgtgtaggcggaggaacgcctcggcggcggccgtggtgggcgccaccgcggtctggttcgtcttcgagcgcgcgggctacagcttcccttccgtcctgtccaacgccctgctcctcctcgtcgccatcctcttcttctgggccaagtccgctttgctgcttaacaggcctcttccacctcttcctaaccttgaggtttcagatgcagttgttgaaaaggctgcagattatgctcttgtatggatcaataggctgctggctgtcggtcatgacatcgccatcaagagaaataggaaagtttttataaaggtgatattgattttgtggctggtttcatttgttggaatgctcttcaactttcttacactcatttacattggtgtaatgctttctctgttggttccaccactctatgagaagtatcaggatcaggttgatgaaaaggttggcgtagcgcacagtataatatcgaggcacataaataccattgttatcagggctgggcaatcagccaaggagaagaagactgaataa

SEQ ID NO: 123 - DNA, 459 bp, Zea mays
atgtgccgcggcctcccaactccagctccagctccagcgcttcaatttcagtcccaggattgcagtcggcagcagcgaggtactacccaagcaccgcccggccgagcgagcgagtccgtgcgtgcgtgcatggcagcagagaggaaggcggcctcccgcccggccgcctgcgggcgaatgcgcggcgccgagggtgccaagccgcggggccgtcaggcaaaggcagcgcgggcaccaccgggccaggggtacttcacggcggggctggcggcgctgttcctttgcctcaccacgctgctcgtgttcctgcctctcgtgctgccgccgctgccgccgccgccgttgctgctgctgctcgtgcccgtgggcctcatggctgtactgcttgcgctggcgctcgtgccgtccgacggccgggccgccgccgccgccgtcgcttcttcatcgtgcgtgtgctga

SEQ ID NO: 124 - DNA, 1449 bp, Zea mays
atggcgagctccgaccatggttccaccaccgcccccaaggacgtgccgggcagctacggcctgccgctggtgggcgccgtgcgcgaccgcctcgacttctactacttccaggggcaggacaagtacttcgagtcccgcgtggagcgctacggctccaccgtggtgcgcatgaacgtgccgccgggccccttcatggcgcgcgacccgcgggtggtggcggtcctggacgccaagagcttccccgtgctcttcgacatggacaaggtggagaagaaggacctgttcacgggcacctacatgccgtccacctccctcaccggcggctaccgcgtctgctcgtacctggacccctccgagcccacccacaccaaggtgaagcagctgctcttctccctcctgctctcccgcaaggacgacgtgatccccaccttccgctccaacttctcctcgctcctcgccaccgtggaggcggagctggccaagggcggcaaggccgagttcaacaagctcaacgacgtgacctccttcgacttcatcggcgaggcctacttcggcgtgcgcccctcggcgaccgagctcggcaagggcgggccgagcaaggcggccaagtggctcatctggcagctccacccgctggtcacgctcggcctccccatggtcctggaggagccgctgctccacacgttccacctcccgcctttcctcgtcaagggcgactacagggcgctgtacaagtacttctccacggtggcgaagcaggcgctggacaccgccgagggcctgggcctgtcgcgcgaggaggcctgccacaacctcctcttcgccaccaccttcaacagctacggcggcctcaaggtgctgttcccgggcctgctggccaacgtggccagcggcggcgagaagctccacgagcggctggtggccgagatccgcggcgccgtggccgacgccggcggcaaggtcaccctcgcggcggtggagaggatggagctggccaagtcggtggtgtgggagtcgctgcgcctggacccgcccgtcaagttccagtacgggcacgccaagaaggacctgctggtggagagccacgacgcggtgttccaggtgaggaaaggcgagatgctgttcggctaccagccgtgcgccaccaaggacccccgcgtgttcggcgacacggccggggacttcgtgcccgaccgcttcctcggcgaggagggcagcaagctgctgcagtacgtgtactggtccaacggccgcgagaccgacaaccccagcgtcgacaacaagcagtgccccgggaagaacttcgtggtgctcgtcggcaggctcctcctcgtcgagctcttcctccgctacgacacattcaccgccgaggtcggcaaggagctgctcggcaccagcgtcatcttcaccggtgtcacgaaagctacctccggtccgggcagcgagtaa

SEQ ID NO: 125 - DNA, 741 bp, Zea mays
atggcgcgggggcgccgttcggccgcaaggcggaggacccggagcccgggcggtgccggcggacggacggcaagaagtggcgatgctccaggggaggcccacggagactccaagtactgcgagaagcacatccaccgcgggaagagccgttcaagaaagcctgtggaagtgacctcccccgccgcctaccgcccgtccgcgttctccatctcgccgcctcgcgcggccgacgcgccgccgccgccgccgggcctcggccacccgcagcagcagcatctccgccacggcgctctctctccagcaggccgcgcccacgccgctggcgctctccagctccacctcgactcgagcctgcacgcggcgtcgccgccgccgtcctaccacaggtacgcccactcccacgctcactacacgccgccgccgccgccgtcgctctacgactacgggcagtccaaggagcttcgggaggcggcggagctcaggcggcggcacttccacgcgctcggggccgacctgagcctcgacaagccgctggccgacgccggggccgcggagaagcccctgcggcgtttcttcgacgagtggccgcgggagagaggcgacacgaggccgtcgtgggcgggggcggaggacgcgacgcagctctccatctccatccccgcggcttcgccctcctctgaccacgctgcctctgccgccgcgcgatgccacaacgatgggagtgatcggtgcatctcctag

SEQ ID NO: 126 - DNA, 3777 bp, Zea mays
atggatgcaccggatgttcaacagagcatgggatataaggagtccaggggtggtatgcctaagtttttccatgcccttggaccagcactcctgatttcaatgggttacattgatctcgggaagtgggtggcagccgttgaagctggttcttgttttggattcgacctggtgttgctggctctccttttcaatttcactgccattgtatgtcagtaccttgctgcttgcattggcactgtcacagggaagaatcttgcagagatatgccaccaagagtacaaccagccaacatgtatattccttggtgttcaagctggattgtctttgttgacgtcagagctgactatgatttttggcatagcactcggattcaacctcctgtttgaatatgatgatctcatcacagggatatgctttgcaacagtgatggaagggacaataaatgcctgcatagcaggatttgcacttcttagttatgtgcttggcttattggttagccagccacaaattcctctcacgatgaatgtaatattccccaagatcagtggtgagagtgcttactctctgatggcgcttcttggtgcaaacataatggcacacaacttctacattcattcatcagttgtccagggtcagaaaaagtcatctgcagttggtcttggagccttatttcacgaccaccttttttcaatattgttcatttttactggaatctttatggtgaactatgttctaatgaactctgcagcagcggaatctactaatactcttctcattaccttccaagatgttgtagagctaatgaatcagatatttgtaaaccctctggcaccaactatatttttagtggttcttctcttctccagccacatcatctcgctgacatctgctatcggtagccaagtgatttcacaccatttattcggtataaaccttcctctttctggacatcgtctcctactgaaggtttttgccatagttcctactctgtactgggcgaaagttgcaggagctgaagggatataccaattattaattatatgccagattattcaagccatgcttcttccatcttcagtcgtcccactttttcgtgttgcttcatcaagatcaataatgggagcccatagagtgtctttgcatctggagatactggtttttcttgcatttctccttatgctattttcaaatatcatatttgtggcagaaatgctatttggcgacagtgggtggatgaacaatctgaaaggatatactggaagccctgtggtgctcccatataccgttttagttttagttgcacttatatctgtggctttttcactgtacctggctgttacaccattgagatctggaagtcatgaagctgaatcccatgaatggtctgtgcattctcagagagaactcttgaatacttctcaagaaagggaagatgttaaggtggacaatgttacatatgaggaagatcaaagatcagatgttgtcccttctcccagggatgtgcctgacagccatccggaactggccttggactatattgatacttctgacactgctgtagaatctgatcacgactctcaacaatctactgcttatgcatccactgctcctgaaacctgctcctccccgtcgtttactcgcgaggagtcaaaatcagttgttgcagtcaactggccggagcctttggagaaggttcctacttctactgtgatggaggaaagcacagtagaaaatgtggtctctaggatcacgactgaaagagatgttttagtagaaacagatgttgtctcgggcaaggataaggaagatatccgtactttggagtctgagaagtcaattgttgatagcaccccatatgtgtctgatgacggtccgccatcccttactttcagcaggggaaagggctcagatgcaggaaatggcagtggtagtctctcaaggttatctggtttgggccgtgcagcaaggagacagctagctgctactcttgatgagttctgggggcatctgtttgattaccatggtaagctcactcaagaagctagcaccaaaaagtttggtatcttgcttgggatagaccttagaacacctagcacatctgtaagaacggataaacaagctgctgaaatacttaagagcccactggtgagagactcaatgcggggggcagcttttttgtcaagctcagtggacatgatgtcccctaagaatgaaacgtcgaatttggaacttgcatatgggcttcagaggggacctggcatgggattgtcaagctggtctcagggtatgcagctaccaaatacacagctgcagagctcaagcaatagcctacttgagcagagtgcaagattaaactcaaattttagttcatcttattcagacaacaatcagttctaccaacctgcaacaattcatggataccagctcacatcttacctgaaacagatgaatgccagcccaagcctttactctagcatgccgctggacccacaacggcttccaaaatcatctgtgtctgctgtgccaaactatgctgattccatgatgcatgctcgtaatcataacctgcttgcttcactgggtggtactactacacagcttcctgcaacatcccgcgtaggctcaatgatgcctgaaagatcgtattatgatccttccagcgttgatgggaatgaaaacgctggttcacctgcttactcaaaaaagtaccacagctcacctgatatgtctggaataatcgctgcaagtagagctgcactcttgaatgaagcaaagttgggtgctgccattggaccacagtcatacctcagcaggctggcggcagaaagatctcaatatgcaagctcaacagccaggcccgcggctccattagcatttgacgagctttcacctcctaagctccagagtgatatcttctcggcgcagtcaagcatgagaccaagtgctagatccctttgggctaagcaaccatttgagcaattgttcggcatgtcaagtgcagagctcagtaaaggtgacttcaatcttccaggcagatcaggtggcgtggccaaggatgatttctcttataaggaatctgagacgaagcttcttcagtccctcaggctctgcatcatgaagctccttaagctagagggatcagggtggctgttcaagcaaaatggtggttgtgatgaagatctaatcgaccgagtcgctgcagccgagaagctattgatgcaagggactgccgagaatcaactgctgcttcatggtggtgatctccagcaacattcttccgaccaggccggcatccagtacatgcgcacgcttcccaactgcggggaggactgtgtttggcgcgcgtcactcgtcgttagtttcggtgtctggtgtgtccgccgagtgctggacatgtctctggtggaaagcaggccagaactttggggcaagtatacctatgtccttaaccgtcttcaggggatcttggaccctgcgttctccaagcctcggggtgctctgacaatatgcacctgccttcagaaagacaccagagtgcgcaatagcccaccccacagtgggctaacagccatgggcccggtccccacaccgatccggggcgccttcacgaccgcaggcgtggttctggagatgatcaaggacgtggaggctgcggtctcaggccgcaagggcaggagcggcacggcggcgggcgacgtcgccttccccaaggggaaggagaacctggcctccgtgctgaagcggtacaagcggcggctcgccagcaagggccagtag

SEQ ID NO: 127 - DNA, 2301 bp, Zea mays
atggctgcggcggcgatcctgccggagctggcgacgcaggtgctcatcccggtcgcggcggccgtgggcatcgcgttcgcggtggtgcagtgggtgctggtctccaaggtgcgggtcacccccgagcgccgcgcggacggcggggccgtgaagagcgggcccagcgactacctcatcgaggaggaggagggactcaacgaccacaacgtcgtcgtcaagtgcgccgagatccagaccgccatctctgaaggagctacatctttccttttcactgagtacaagtatgttggattattcatgggcatctttgcaatccttatattcctcttccttgggtctgtcgagggattcagcacgaagagtcaaccttgccactatatcaaggaccagacttgcaagcctgcccttgctaatgccatcttcagtactatagcttttgtgcttggtgcagtcacctcactagtttccggctttcttggaatgaagatcgcaacttatgcgaatgcccggacaactttagaggccagaaagggtgtcggaaaggcatttattactgccttccgagctggtgcagtaatgggcttcctgcttgctgccagcggtcttttggttctttacattgctatcaatttgtttggaatttattacggtgatgactgggaaggtctttttgaagctattactggttatggccttggtggttcttctatggctcttttcggccgcgttggtggtggtatttataccaaggctgctgatgttggtgctgaccttgtggggaaggtagaaagaaacattcctgaggacgatccaagaaacccagctgttattgctgacaatgttggtgataatgttggagatattgctggaatgggatcagatctctttggctcatatgctgaatcatcatgtgctgctcttgttgtggcctctatctcgtcttttggaatcaaccatgaatttactccgatggtgtaccctcttctcgtcagttctgttggtattatagcatgtctcataacaacgctgtttgcaactgatttcttcgagataaaggctgtggatgaaatagagcctgctctcaagaaacagctcataatttccacaattgtgatgaccattggcattgcactaatcagttggcttggtcttccatacactttcactattttcaactttggagtccagaagacagtgcaaagctggcaattgttcttgtgtgtggcggttggtctctgggctggcctagtcattggttttgttactgagtactacacaagcaatgcctacagccctgtacaagatgttgctgattcctgcagaactggagcagctactaatgtcatttttgggcttgctttgggttacaaatcagtcattatcccaatttttgctattgcgtttagtatcttcctcagcttcagccttgctgccatgtatggtgttgctgtggctgctcttggaatgctgagcaccattgccacaggtcttgctattgatgcatatggccctatcagtgataatgctggaggaatagctgaaatggctgggatgagccataggattcgtgagagaactgatgctctagatgctgcaggaaataccacggctgcaattgggaagggttttgccattggctctgcagccttggtttcccttgcactatttggtgcgtttgtaagccgggctgctatctccactgttgatgttctgactcctaaagtattcatcgggcttattgtcggtgctatgctcccgtactggttctcggcaatgaccatgaagagtgtgggcagtgctgcgctcaagatggtggaggaagttcgtcggcagttcaacaacatccctgggctcatggaaggcaccacaaagcctgactacgcaacttgtgtcaagatctcaacggatgcatccatcaaggagatgatccccccaggtgctcttgttatgctcacaccactgatcgttgggattctatttggggttgagaccctctctggagtccttgctggtgcccttgtctctggtgttcagattgccatttctgcatccaacactggtggtgcctgggacaacgccaagaagtacattgaggctggagtttcagagcatgccaggacccttggcccaaaaggttctgaccctcacaaggcggctgtcattggtgacaccattggagatcctctcaaggacacgtctggcccttccctcaacatcctcatcaagcttatggcggttgaatcccttgtcttcgcccccttcttcgccgcccatggtggcattctcttcaaatggctctaa

SEQ ID NO: 128 - DNA, 675 bp, Zea mays
atggtgcgggggaagacggagctgaagcggatagagaacgcgacgagccggcaggtgaccttctcgaagcgccgcaacgggctgctcaagaaggccttcgagctctccgtgctctgcgatgctgaggtcgggctcgtcgtcttctccccgcgcggcaagctctacgagttcgccagcgccgccagcctccagaaaacaattgaccgctacaggacatacacaagggaaaatgtcaataacaagactgttcaacaagatatacagcaagtcaaagcagatgccgtaagcttggcaagtagactcgaagccctagaaaagaccaaacgaatgtttctgggtgaaaatttagaagaatgctccattgaagaactgcataatctggaggttaaactggcgaagagccttcacgtcatcagagggaagaagacacaactgctggagcagcagatatccaagctgaaggagaaggagaggaccctgctccaagacaacaaagagttgcgggataagcagcgcaacctccagtctccaccggaggcgccaccggacctgaaccgctgtgtccctccttggccgcgtagcctgccggcaccgagcaatgacatggacgtggagacggagctgtacataggattacccggcagggagcgctcctccaaccgggactctgattga

SEQ ID NO: 129 - DNA, 1749 bp, Zea mays
atggctaccccctaccgtcttccttgctgctgctatgccctcgtcactgtgctcgtgctcttcttctccgtcgacgctacggagggcgccatcagggagtaccagttcgatgtgcaaatgaccaatgtgacgcggctgtgcagcagcaagagcatcgtgacggtgaacggccagttcccggggccgacggtgttcgcgagggagggcgacttcgtcgtcatccgcgtcgtcaaccacgtcccctacaacatgagcatccactggcacggcatccggcagctgcggagcgggtgggcggacgggccggcgtacatcacgcagtgcccgatccagagcggccagagctacgtgtacaagttcaccatcacggggcagcgcggcacgctgtggtggcacgcgcacatctcctggctgcgcgccaccgtctacgggcccatcgtcatcctgcccaagcccggcgtcccttacccgttcccggcgccctacgacgaagtccccgtcttgttcggggagtggtggacggcggacacggaggcggtgatcagccaggcgctccagaccggcggaggccccaacgtctccgacgccttcaccatcaacgggctgcctgggccgctctacaactgctctgcaaaagacacgttcaagctgaaagtgaagcccgggaagacgtacatgctccgcatcatcaacgctgcgctcaatgacgagctcttcttctccatcgccggccacccgctcaccgtcgttgacgtcgacgcggtctacatcaagcccatcaccgtggagaccatcattatcacccctgggcagaccaccaacgtgctcctcaccaccaagccgtcctaccccggcgccacctactacatgctggccgcgccctactccaccgccaggccgggcaccttcgacaacaccaccgtcgccggcatcctcgagtacgaggaccccacgtcgtcccctcccccgcacgcggccttcgacaagaacctcccggcgctgaagccgaccctgccgcagatcaacgacacgagcttcgtcgccaactacacggccaggctccgcagcctggccaccgcggagtacccggccgacgtgccgcgggaggtgcacaggcggttcttcttcacggtcgggctgggcacccacccgtgcgccgtgaacgggacgtgccagggccccaccaacagcagccggttcgcggcgtccgtgaacaacgtctccttcgtgctccccaccacggcgctgctgcagtcgcacttcgccggcaagtccaggggggtgtactcgtccaacttcccggccgcgccgctggtcccgttcaactacacggggacgccgcccaacaacaccaacgtgtccaacggcaccaagctggtggtgctgccgtacggcaccagcgtggagctggtgatgcagggcaccagcatcctcggcgccgagagccacccgctgcacctccacggcttcaacttcttcgtcgtcggccaagggttcggcaacttcgaccccgccaaggacccggccaagtacaacctcgtcgaccccgtcgagcgtaacaccgtcggcgtgccggcggccgggtgggtggccatccggttccgcgcagacaatccaggggtgtggttcatgcattgccacttggaagttcacgtcagctggggcctgaaaatggcatggctggtgctggacggagaacgccccaacgagaagctgctgcctccgccatcggatctgcccacatgttag

SEQ ID NO: 130 - DNA, 309 bp, Zea mays
atggagagagttgcatcaagctactgcgtcagcctcctagcacaaagcaggagggcctacactgtggccgcggccatggctaagaagggagccgccgcacggagggtcgacgagaagaaggcggcggccgcgctgaccaagcgcgtgatgggcaagaaggaagtgaacacggctgccgctgcggcagctgaggagaaggcgtgggtgccggaccctgtcaccggctactatcgcccagcaggtagcgccaaggaggttgacgcggcggagctacgcgccaagctgctgacggaggctgcggccaactga

SEQ ID NO: 131 - DNA, 942 bp, Zea mays
atgcggatgagctgcaatggctgccgcgtcctgcgcaagggctgcggcgacgcctgcaccatccgcccctgcctgcagtggatcgaggcccccgaggcgcaggccaacgccaccgtcttcctcgcaaagttctacggccgggcgggcctgctcaacctgctcgccgccgcgcccgacgacggcgtccgccccgcggtcttccgctccctgctctacgaggcgtgcggccgcatcgtcaacccggtctacggctccgtcggcctgctctggtcgcgccagtggcacaggtgcgccgacgccgtcgaggccgtgctcaggggggaccccgtcgtgcaggtcgacgccgggtccgacgccgccgctgccccgccgctgctcgccggcgccaggccgccgccgccggccgccttcgacatccgccacgtccccagggatcccgacgccaccgccgccgacctcctccgcgccggccgcaagaggttcaagcgcgcgggttcgtcttccaacgcctccaaggcgaagcccctgcccctcgagctcgagggcaaggccggcaacaacgaacgcgcgtcgcccagccctcccccgacgcaacaacgagaggcggaggagctgcagccggtgccgatggtcgtcgagccagaacacggcgaggagtccgccggcagccacgaccaccacctgcagctgcaggggtggtcggaggaggacaccgacgtggaggcggcctcacacgtgagccaagccgaggctgagccgccagccagcagccagagccaggtgctggtagcggatcaggaggaagaggaggttgggctcgagctcacgcttgggttcgagcctgtcgtcaggcagcagccgaggtcgtcgcgctgcgacaagagcggcttgagcgcggcatcgagcctcatcggcctgcggctgcagctgccggccgcctaa

SEQ ID NO: 132 - DNA, 1626 bp, Zea mays
atgagcggcttcttggcggtggtcggcaaggtcggcacctttctgctgtgggtgctgttcctggtcttgcagaccgccaccaggatcgtcggcagcctccttgccagctcagctgagcagcaggatgaccaccatcaggaatcggcggcggcacggcgcaggtcgccgccagcctccccacatcccgaactttacgagccggcgtctgcgtctctggcgcagctgtgggacccaccgcctcttccgcaccttgcttttgctcccgctgcggatgagagctcttcgtcctccagcttacggcggcgtgccagtgcgccgctgccccgagcggatgaagactttgtggtgccatcgagcgcttactcgcgtccaacagtgggggtggctcatacacactctgtgtcagcaccaccactgagggcaatcgagacgcgggcggtgccatctaggctggtgacagccgggggtaagcggccaaggctggagaggaagtactccaagattgttgaccagtaccgatccttggatgaggttattgaagcattagcacaggctggtcttgagtcttctaatttgatcataggaattgatttcacaaagagtaatgaatggacaggaaagaattgcttcaatggtatgagcctgcataatatcagtgacaacccaaatccttatgaacaggcaatatccatcattgggaaaaccttatctgcttttgatgaggataatttaattccttgctttggttttggagacgcatctactcatgaccaagatgtatttgccttctatcctgatgaaagaccatgcaatggttttcaagaagctttagctcgatacagagagattgtacctcatcttcgcctttcgggtcctacgtcattcgccccaataattgacatggccacaaccattgtggagcaaagtggtggccaataccatgttttagtaattattgctgacgggcaggtcacaagaagtgtagatactgaatttggtcagttaagcacccaggagcaaatgacagttgatgctattgtacaagcaagccaattcccattgtctataattcttgttggagttggagatggtccatgggatatgatgaaggaatttgatgacaatataccagctaggtcttttgacaatttccagtttgtcaacttcactgcgatcatgtcaaaaaagataagtcaaagcaaaaaggagacagagttcgccctttcagcactaatggaaattccattgcaatacaaggcaacattagagcttggaattttaggacgtcgaattggagagtcacctgagcggattccacttcctcctccttttgcaagttatagcacagtttcaagagcagaaccatctcgggcaaatagttatcgaagtgtgccttcacatccaagggaggagccagctgtaaattcaactatcacagcatcagttacatccccatcagctgccgaaagtagagttttagaaccccagatgtgcccagtttgcctttccaaaccccgggacatggcatttggttgtggccaccagacatgttcagaatgtggaccgcaagtcacagattgccccatctgtcgaaggcccattgacacgagagtaaaattgtactaa

SEQ ID NO: 133 - DNA, 567 bp, Zea mays
acagtgtcgccactcgccacagagcgctccatcaacacgaccgccggtataaacgcagcccccctccggcctccaccaaggccaacattgctcaggctgctcccaactcccatcctccccctcccggagtacgaagtactagaaagagagcggctttcctctaagaatggcgggtggcggcgccggcgacgacgacgtggtggtggtgagctgcggcggcagaggcggcggcgaccccggcgcatacgccgcggtgctcaagaggaagctcgacctgtactgcgccgccgtcgccaaatccatggtgacatagatggggcaagcctagttacaaactctaatgtcatagaagatgatgattttcaaggcaagccaaccaacagtggcacatcaaaggaactgtcagacgatgatggtgaccttgaagagaatactgaccccgctaacgccaagaagatgaggagaatggtgtcaaaccgggaatcggctaggcgatcaagaaagaggaagcaagcacacttgaccgatcttgaatcacaggtttcaattgtgttagaatatagatga

SEQ ID NO: 134 - DNA, 1275 bp, Zea mays
atggagaatctgagatctcaaaactgccaccaaggtgttgccatggagggagtcaagtttgcgccggagaaggccaacaccaaccggagagccctcagcgacatcaagaacataataggaggcccacaccagcacttggcggtcagcaagagggctctgtcagaaaaaccagctgctgctgctgctgcaaatgctaaagatcaagctggctttgttggacaccgtccagtcaccaggaaattcgctgcaacattggcaacccaacctacagttgcccttctggacccaattggaagtgaaagactgaaaagaaacgctgatacggcatttcacacacctgcagatatggaaagcacaaaaatgacagatgacagtcccttgcctatggtgtcggagatggatgaaatgatgagtcctgaactgaaagagatcgagatggaagatattgaggaggcagcacctgatattgacagtggtgatgcaggaaattctctggctgtggctgactatgtagatgaaatttacagattttacaggaaaactgagggtgcaagctgcgtccctacaaattatatgtcaagccaaactgatataaatgagaagatgcgtggcattctaattgactggctcatagaggtacactacaaactagagctgttggaggagacccttttcctaaccgtgaacatcatagacagattcttggcacgtgaaaatgtggtgcggaagaagcttcagttagctggtgtaactgctatgttgctcgcgtgcaagtatgaagaagtgagcgtacctgtggtcgaggatctgatcttgatctgtgatcgtgcatacacaagggctgacattcttgagatggagaggaggatagtgaacacacttaatttcaatatgtcggtgccgactccatactgtttcatgagaaggtttctaaaggcagcacaatcagagaagaagctcgaactcctgtctttcttcatgatcgagttgagtcttgtcgaatatgagatgctccagttctgcccgtctatgctagcagccgctgccatctacaccgctcaatgcaccataaatgggttcaagtcctggaacaaatgctgtgagctgcacacaaaatattcagaagaacatctaatggtttgctctaggatgatggttgaactgcaccaaagagcagctcatgggaaacttacaggggtccatagaaagtacaacacttctagatatagctatgctgcgaaatcggaacccgcaactttcttgctggatgcctga

SEQ ID NO: 135 - DNA, 2448 bp, Zea mays
atggaggttgccacgcacatggcaaggtccagcaccgtgtactggtcgctgctcgccgtgttctcttggttggccgccgccggcgcaggccttggcgacggcgggaggtcgccgccgcaggtgtacgtcgtgtacatgggcgccgtgccgccccggacatcccccagcctgctcttggaaagccacctgcgcctcgtcagcacggtactcaagaggggccggagggcagacagcttagtggtgcaccagtacaagcacggcttctctgggttcgcggcgcggctgtccaaggacgaggccgccgcgctgaggcggaagcccggcgtcgtctccgtgttcgccgacccggtgtaccagctgcacaccaccaggtcctgggacttcctgcagcagacgacgacggccgtcaagatcgacgacgccgccggcgccggccctgctagacgcagcggcaacaagaagggtaaggccgccgcacccgccaacgacccgtcgtcgtcgtctccggcggcggacactatcatcgggctgctcgactccggcatctggcccgagtcacccagcttcaacgacgccggctttgggcgcccacccagccggtggaagggagtgtgcatggctggggatgacttcaactcatccaactgcaacaataagctgatcggcgcgagatactacgacctcagcagcgtaagggggccggcaccgagcggcggcgggtcgccgcgggacgacgtgggccacggcacgcacacgtcgtccacggccgccgggagcgcggtgaccggcgcctcgtactacggcctcgccccggggaccgccaaggggggctccgcggcctccagggtcgccatgtaccgggtctgctcccaggcgggctgcgcggggtcggccatcctcgccggcttcgacgacgccatcgccgacggcgtcgacgtcatctccgtctcgctgggcgcgtcgccctacttccgcccggacttctccgcggaccccatcgccatcggctccttccacgccgtcgccaagggggtcacggtcgtgtgctcggcggggaactccggcccgggcgccgccaccgtcgtcaacgcggcgccctggatactcaccgtcgccgccaccaccatcgaccgcgacttcgagtccgacgtcttgctcggtggaaataacagcgccgtcaagggtgtagctataaacttctcgaacctggacagatcccccaagtatccattgatcaccggcgcagcggcgaagtccagctcagtttctgacaccgactcagcaagccactgtgagcccggcacgctggacagcagcaagatacgagggaagatcgtgctgtgccaccactcgcagagcgacacgtcgaagctggtgaaggcggacgagctccagagcgccggggcggcggggtgcatcttggtgatgaacgacaacgagagctcggtggccaccgcctacctcgacttcccggtcaccgaggtcacctccgccgccgccgcggcgatccacaagtacatcgccgccgccagcgaaccggtggcgacgatcacggcggcggccaccgtgacggagtgcaagccggcgcccgtggtggcctacttctcgtcgagggggccgtcggggcagaccgggaacgtgttaaagccggacatcgcagctccgggggtgaacatcctggcgtcgtggatcccggcgtcgtcgctcccgccggggcagaagcagccctcgcagttcaacctcgtgtccgggacgtccatggcctgcccgcacgtcgccggggccgccgctaccgtcaaggcgtggaaccccacgtggagccccgcggcggtccggtcggccatcatgaccacggcgaccacgctgaacaacgagcgcgagcccatgacgacggactccgggtcgccggcgacgccgtacgactacggcgccgggcaggtgcacccggcgggcgcgctggaccccgggctggtgtacgacgccggggaggacgactacctccgcttcctctgcaactacggctacaacgcgtccactgtgaggctcgtcgcctccaccctccccagcgggttcagctgcgcggccaacgttagcaaggacctcatctccgacctcaactacccgtcgatcgccgtgacggggctcctcggcaataaatcggctgcggcgggccgaagccggaccgtgacccgcaccgtcaccaacgtgggggcgcaagaggcggcctcctacacggtcgccgtcagcgcgccgcccggcctggacgtgaaggtcacgcccagtaagctcgagttcaccagaggcgtcaagaagctggccttccaggtgagcttctcccgtagcgggaacgacgacgacgcggcggcggccaagggcgccctttcgggctccataacatggtcagacggaaagcacatggtccgcagcccgtttgtggtcaccagctga

SEQ ID NO: 136 - DNA, 819 bp, Zea mays
atggcagcgcagtccatgctcatgtcgaccagcgtcaacggcggccgcgcgctgccgtctcttcaggccgtccggccggctccatacccgcggctaccgctgccgtcgtcgtcgtcctcgtcagctggctacaggcactccaagtccgtctccgtgaagacgctcgccctgttcggcaaatccaaggtcaagaccgcgccggcgaagaaggctgctgcgcccaagcccaagccgaaggttgaggatggtatcttcggcacgtccggcgggatcggtttcaccaaggagaacgagctgttcgtcggccgcgttgccatgcttggctttgccgcatcgctacttggagaggccattaccgggaagggcatccttgcgcagctgaacctggagacgggcatccccatctacgaggcggagcccctcctcctgttcttcatcctcttcaccctccttggcgccatcggcgctctcggagaccgcggccgcttcgtcgacgaggaggtcaccggcctcgacaaggccgtcatccaacccggcaagggcttccgcggcgccctcggcctcagcgagggagggccgctgttcgggttcaccaagtcgaacgagctgttcgtggggcggatggcgcagctgggcgtggccttctccatcatcggcgagatcatcacggggaagggcgcgctggcgcagctcaacatcgagacgggggtgcccatcaacgagatagagccgctcgtcatcttcaacgtcctcttcttcttcatcgccgccatcaaccccggcaatggcaggttcatcatcggcgaggaagaggaatag

SEQ ID NO: 137 - DNA, 609 bp, Zea mays
atgaggatgcgtgcgcgggcggcatcggcatctgcgtcggcggctgtggtggtgctgctcctgctcctgctactggtgggcgtctgcgcgggcgccgtgtacaaggtaggcgacctggacgcctggggcgtgccgccgccgtccaagcccgacgtctacaagcgctgggccaagtccatccacttcgcgctcggcgactccatctggttcctgtacccgccgagccaggactcggtgctgcagctggcgccggcggccttcgcgtcctgcgacctgtcgcgccccgtggccaggctcgccgacggcaactccttattcaacctcaccgcgcccggccgcgcctactacgccagcggcgcgccgggtcactgccgcaggggccagaagctctgggtcgacgtgcccttgcccaacggcacctacctccagccctccgccaccgacctcgccgcgctcgcgcccacccccgccgccgacccgcccgccgggttcgcgtccgctgccgccgccgcgccacaggggggcaacgcctcgcccgcgccccgcgccgccgccgccgctggatccgtcgtcgcactctccttcgcgctccagatcctcctcctctga

SEQ ID NO: 138 - DNA, 2241 bp, Zea mays
atgacgcgccgggtgcggcggcggacatgcagggaacgggagggtaaggtggtgcggggcgcatcgcgtgttgtttcggctgggccggaaggcgaggaggatgcggcggcggtggaggtggactggagggcgctgccggacgacacggtgctgcagctctttgcgcggctgaactaccgcgaccgcgccagcatggcgtcagcgtgccgggcttggcgagcgctgggctcgtcaccctgcttgtggaggacgctcgacctccgcgcacatcgctatgacagggaggtggcgtcgtcgcttgcctcgcggtgcgggagcctgcgtcggatacgcttgcgcggccacgaggcggcagaggccgtcctgggcctccgtgcgcgtggtcttcgcgaggtggtggccgatggctgccgcggcctcacagatgccacgctcgctgtcctcgccgcgcggcacgaggacctccagagcctccagatcgggcccgatcctctcgagcgcatctctagcgacgccctccgccacgtcgcgctttgttgctcgcagctctgccgccttcgcctctcgggtctccgtgaagttgacgcggaggccgtcggagcgctcgcccggtgctgccccctcctcgaggatgtggctttcctcgattgtggcaccgtggatgaggccgcccttgctggtatccactctgtccgattcctctctgtagcaggatgccggaacctgaaatgggctactgcatccacctgctggacccagcttccctccctcattgcccttgacgtctcccgcactgatgttccgccaagtgctgtttcacgcctcatttcccatgccaaaaccctcaagctaatatgcacgctgaactgcatttctgttgaggaggaacagcttcacaatcctgctgtatttagtaactctaagggcaaggtcgtgctaacgattaacagcgatatcttcaaatcttttgagaccatgtttccagttgtggatgtgaaagagcatgagtttttcaatcaatgtaactggagtcacaaagacaagatacctggtgatacgatgacatggctcgaatggatcctgtcacagtcacttctccgaattgcagagtccaacccacaaggcatggatggtttctggctgcagaagggcactacactgctgcttagactgttgaagagtttacaggaggatgtgcaggagcgggcagctacgtcgcttgctacgtttgtagttatggatgatgagagtgcaaatgtggatcctgcaaggtcggaggcagtgatgcagaatgggggcattcgaatgttgctggaccttgcaaggtgctcaagggagagcgcacaatctgaagcagcaaaagctattgccaacttgtcagtgaataccaaggttgccaaggcagttgcagatgaaggcggcattacaatactcattaatttagccaagtcgatgaataggcttgttgccgaagaagctgctggtggcctttggaatctctctgtaggcgaggaccacaaggcggctattgcagtatctggtggcattaaggccctggtcgatctaatatttcgttggcctgctggaactgatggagttcttgaacgtgctgctggcgcgcttgcaaacctggctgctgatgacaagtgtagcttggaagttgcaaaggctggtggtgtccatgctttggttacacttgctagatcatgtaaacttgatggtgtcctagaacaggctgcaagaggtctggctaacttagctgcacatggggacaacaatgacaacaatgctgctgtaggtcaggaagcaggggctctggaggcactggtgcaactaacaagttctcaaaacgagggtgtaagacaagaagctgctggtgctttgtggaacctgtcatttgatgacagaaaccgtgaagccattgctgcagtgggtggcgttgaagctttggttgccctagtgcaacaatgtttgaatgcttcagaaggtcttcaggagagagctgctggtgcattgtggggattatctgtttcagaagctaatagcattgcaattgggcagggtggtggggttgcaccattgctcacattggcacgctcagaggttgaagatgttcacgagacagctgcaggggcactatggaatcttgcattttattctgaatggatgaagttgctttggttggagcatcctcagatagcagttccaagagtgttaatgttgagggagctagaagaatag

SEQ ID NO: 139 - DNA, 810 bp, Zea mays
atgtctcggtactgcgtcaacgagcagtcgagcacccggcctcatcctgcctcggcaggcagttggcacggcagcaccccagcaggcagcagcccctccaatttaaagcaagcaacgacgggcaaagagcagctcggcgggggctgctgcagcgccgcgcgtttgcgagtccgggacgacgacatggggaggggccgcagcgagataaagcggatcgagaacccgacgcagcggcagtccaccttctacaagcgcagggacgggctcttcaagaaggcaagggagctcgccgtcctgtgcgacgtcgacctgctgctgctcctcttctccggctccgggaagctgtaccactacctctcgcccaccgtgcccactgtcaaggacctggtcgagaggtacgaggccgcgacgcacagcaaggtctgggccgacgttcgccaggagcggcgcgcggagctggagaaggcggagcggatgtgcgagctcatggagaaggagctgcggttcatgacggtggacgacggggagcagtacacggtgccgtcgctggagctgctggagcacagcctggaggcggccgtgcacagggtgcgctccgagaaggaccgcaagatcggcggcgagatcgactgcctccagaacattatcagaggacgccacgaggagcgctacgggttgtgcgacaagaacttcttgcaaatttggccgcagcttgctcattctcaggcctggaacaacggcggggaaggtggagggtcgaccccaccaagcggcggcggcggcctggaactcaaactgggtttcaactga

SEQ ID NO: 140 - DNA, 1095 bp, Zea mays
atggaccgggcggcgctcaccgtgggcccggggatggacatgcccataatgcacgacggcgaccgctacgagcttgtccgcgacatcggctccggcaacttcggcgtcgcgcgcctcatgcgcaaccgcgccgacggccagctcgtcgccgtcaagtacatcgaccgaggcgagaagattgacgagaacgtgcagcgggagatcatcaaccaccgctcgctgcgccaccccaacatcatccgcttcaaggaggtcatcctcaccccgacgcacctggccatcgtcatggagtacgcctccggcggcgagctcttcgagcgcatctgcaacgccggcagattcagcgaggacgaggcgcgtttctttttccaacaactcatatcaggggtcagctactgccattccatgcaagtatgccatcgtgacttgaagctagagaacaccctgttggacggcagcaccgcgcctcgcgtcaagatatgtgatttcggctactcaaagtcatcagttctacactctcagcccaaatctaccgtgggaactccagcatacattgctcctgaggttcttctgaagaaggaatacgatgggaaggttgccgacgtgtggtcgtgtggggtaaccctctacgtgatgctggtcggcgcgtatccattcgaggacccagacgagcctaagaatttcaggaagacgatccagagaatactgggcgtgcagtactcggttccagactacgtccacatatctccggaatgccaggacctaatctccaggatcttcgtcgccaacccgtccaccaggatcaccatgcccgagatacggagccacccttggttcctgaagaacctcccggccgacctggtggacgacagcgcgacgacgacgagcaagcagtacgaggagcccgagcagccgatgcagggcatggacgagatcatgcagatcctgggcgaggccaccattccggcggcggggtcccgcgggctcaaccagttcctgaacgacggcctggacctcgacgacgacatggaggacctggactcggacgccgacctcgacctggagagcagcggggagatcgtgtacgctatgtga

SEQ ID NO: 141 - DNA, 1692 bp, Zea mays
atgagggcgatggcggaggtgatgcaggaggggtgcgtggagaatcggcagccactggcggcttcgagctcgtccgtgtcggatggcagcagctgtggcggcggagagcgggcggggacgtcgccgccggtgtcaagctccgggaattgcatctccgttctgagacgaacaagtggaccgataagaagaactaagggtggctggacactgaaagaggatgaaacactgcggaaggcagttgaagctttcaagggtagaaattggaaaaaaatagctgaattttttcaggacagaactgaggttcaatgtttgcatcgttggcagaaggttcttaatccggaacttatcaaaggcccttggactcaagaggaagatgaaaaaatcattgaccttgtgcgcaagtatggaccaacaaaatggtctatcatcgcaaaatcattgcctggccgcataggcaagcaatgccgagagaggtggcataatcacctgaatccagaaataaggaaagatgcttggactcctgaggaggaaagggcccttattgatgctcatcaagtgtttgggaataaatgggcagaaatagcaaaagttcttccgggaaggactgataattccataaagaatcattggaacagttctttgaaaaagaagttagaagcctatagtaacagcagtgttctttcagtttcaaagctgtttgttcatgatgatttcaaggataaaatgaagcccgtggctactgatggtcatcttgatctgaaccaaatgccaagcattggttccaaagattcctctggaagagcttatcattccattgtgagcccactttcacaggcatacaatttggactcaagctgcctctctctttctataccaaccatgcagcctctaacttcacatgaaatgtcatcactaattgatggttctgctgttactttggtggtacaatgtctggaaagtgactctgtccgtgacaaggaccaagaaattgactctgttcaagagaagggtgttgaggttagctcaacacctgatcctgttggggttgaattagaatctgcaccagccaaaagaggtgcagaattatcttcaaagaacgagttgcattctacccttggtcctctttgttatcagattttaaacatggaagatgtgatcccaatcagtaccccactctgttctgaacataatggtgcacatcaaacatcacaacaatgcatgtcacccaatggttatacttctctctctccaacgattggaaaagtatcaagtcagctaactgttgattcaattttgagaatggctgctgatagctttccatgtactccttcaatactaaggaaaagaaaacgtaataaagcaacacctggttcaggtaatgagttgaagacgggtggagtaaacaatgatagcttttacactcctaatggaactaatgggaaggacactactccacggtcatttaaaactgctgcatccttctcatcgctgggttctgttgatgggctattgacttctgtaaggagttttgattcttcaccaccctatcagaaaaggtcaaaaagaatggctatcatcaaatcagttgagaaacagctagatttttcagcagatggactggatacttctggttctgagattatgaactctccttgtcataattcccaaggcgtagattctaacaggatgtag

SEQ ID NO: 142 - DNA, 1692 bp, Zea mays; identical to SEQ ID NO: 141

SEQ ID NO: 143 - DNA, 1692 bp, Zea mays; identical to SEQ ID NO: 141

SEQ ID NO: 144 - DNA, 2913 bp, Zea mays
atggcgtcgaccaaggctcccggccccggcgagaagcaccactccatcgacgcgcagctccgtcagctggtcccaggcaaggtctccgaggacgacaagctcatcgagtacgatgcgctgctcgtcgaccgcttcctcaacatcctccaggacctccacgggcccagccttcgcgaatttgtccaggagtgctacgaggtctcagccgactacgagggcaaaggagacacgacgaagctgggcgagctcggcgccaagctcacggggctggcccccgccgacgccatcctcgtggcgagctccatcctgcacatgctcaacctcgccaacctggccgaggaggtgcagatcgcgcaccgccgccgcaacagcaagctcaagaaaggtgggttcgccgacgagggctccgccaccaccgagtccgacatcgaggagacgctcaagcgcctcgtgtccgaggtcggcaagtcccccgaggaggtgttcgaggcgctcaagaaccagaccgtcgacctcgtcttcaccgcgcatcctacgcagtccgcccgccgctcgctcctgcaaaaaaatgccaggatccgaaattgtctgacccagctgaatgccaaggacatcactgacgacgacaagcaggagctcgatgaggctctgcagagagagatccaagcagccttcagaaccgatgaaatcaggagggcacaacccaccccgcaggacgaaatgcgctatgggatgagctacatccatgagactgtatggaagggtgtgcctaagttcttgcgccgtgtggatacagccctgaagaatatcggcatcaatgagcgccttccctacaatgtttctctcattcggttctcttcttggatgggtggtgaccgcgatggaaatccaagagttaccccggaggtgacaagagatgtatgcttgctggccagaatgatggctgcaaacttgtacatcgatcagattgaagagctgatgtttgagctctctatgtggcgctgcaacgatgagcttcgtgttcgtgccgaagagctccacagttcgtctggttccaaagttaccaagtattacatagaattctggaagcaaattcctccaaacgagccctaccgggtgatactaggccatgtaagggacaagctgtacaacacacgcgagcgtgctcgccatctgctggcttctggagtttctgaaatttcagcggaatcgtcatttaccagtatcgaagagttccttgagccacttgagctgtgctacaaatcactgtgtgactgcggcgacaaggccatcgcggacgggagcctcctggacctcctgcgccaggtgttcacgttcgggctctccctggtgaagctggacatccggcaggagtcggagcggcacaccgacgtgatcgacgccatcaccacgcacctcggcatcgggtcgtaccgcgagtggcccgaggacaagaggcaggagtggctgctgtcggagctgcgaggcaagcgcccgctgctgcccccggaccttccccagaccgacgagatcgccgacgtcatcggcgcgttccacgtcctcgcggagctcccgcccgacagcttcggcccctacatcatctccatggcgacggccccctcggacgtgctcgccgtggagctcctgcagcgcgagtgcggcgtgcgccagccgctgcccgtggtgccgctgttcgagaggctggccgacctgcagtcggcgcccgcgtccgtggagcgcctcttctcggtggactggtacatggaccggatcaagggcaagcagcaggtcatggtcggctactccgactccggcaaggacgccggccgcctgtccgcggcgtggcagctgtacagggcgcaggaggagatggcgcaggtggccaagcgctacggcgtcaagctcaccttgttccacggccgcggaggcaccgtgggcaggggtggcgggcccacgcaccttgccatcctgtcccagccgccggacaccatcaacgggtccatccgtgtgacggtgcagggcgaggtcatcgagttctgcttcggggaggagcacctgtgcttccagactctgcagcgcttcacggccgccacgctggagcacggcatgcacccgccggtctctcccaagcccgagtggcgcaagctcatggacgagatggcggtcgtggccacggaggagtaccgctccgtcgtcgtcaaggaggcgcgcttcgtcgagtacttcagatcggctacaccggagaccgagtacgggaggatgaacatcggcagccggccagccaagaggaggcccggcggcggcatcacgaccctgcgcgccatcccctggatcttctcgtggacccagaccaggttccacctccccgtgtggctgggagtcggcgccgcattcaagttcgccatcgacaaggacgtcaggaacttccaggtcctcaaagagatgtacaacgagtggccattcttcagggtcaccctggacctgctggagatggttttcgccaagggagaccccggcattgccggcttgtatgacgagctgcttgtggcggaagaactcaagccctttgggaagcagctcagggacaaatacgtggagacacagcagcttctcctccagatcgctgggcacaaggatattcttgaaggcgatccattcctgaagcaggggctggtgctgcgcaacccctacatcaccaccctgaacgtgttccaggcctacacgctgaagcggataagggaccccaacttcaaggtgacgccccagccgccgctgtccaaggagttcgccgacgagaacaagcccgccggactggtcaagctgaacccggcgagcgagtacccgcccggcctggaagacacgctcatcctcaccatgaagggcatcgccgccggcatgcagaacactggctag

SEQ ID NO: 145 - DNA, 969 bp, Zea mays
atggagcacggtgccgtcgccgggaagcccaaggtggtgttcgtgctcggcgccacagcgacagggaagtcgaagctcgccatcgccctcgccgagcgcttcaacggtgaggttatcaacgctgacaaaatccaggtccacgatggcgtgcccatcatcacgaacaaggtcacagaggaagagcagggcggggtgccccaccacctgctcagcgtccgccacccggacgccgacttcactgcggaggagttccgacgtgaggcggccagcgccgtggcccgcgtgctctcggcgggccgcctccccgtcgtggcaggcgggtccaacacctacatcgaggcactggtggaaggcgacggcgccgccttccgcgcggcgcacgacctcctcttcgtctgggtggacgcggagcaggagctgctggagtggtacgccgcgctgcgcgtggacgagatggtggcccgcgggctggtgagcgaggctcgcgcggcgttcggcggcgccggggttgactacaaccatggcgtgcgccgcgccatcggcctgccggagatgcacgcctacctggtggcggagcgcgagggcgtcgctggggaggccgagctcgcggccatgctggaacgcgcggtgcgcgagatcaaggacaacaccttccgcctcgcgcgcacgcaggcggagaagatccggcgcctcagcacgctcgacggctgggacgtccgccgcatcgacgtgacccccgtgttcgcgcgcaaggccgatggcactgagtgccacgagctgacttggaagaagcaggtgtgggagccgtgcgaggagatggtgagggctttcctcgagccgtccctgactgccgttccaggtgttgcagtaactgaagaagggaacgccggcgtcgtcgctactgctgcacccgctggtgatgtcgtcgtcccaactggcgatgtcgtcaccgccgtggctgatgcataa

SEQ ID NO: 146 - DNA, 981 bp, Zea mays
atggccgacaacgcgaaggccgcggcggcgcatgcgaggccggagtcgtcgcaggaggaggaggaggactggaaggaggccgagggggacgtcgccgaagtcgaccgcgccgccaccaatggcgccggcgaggggggcgtgcccacagacaggccgatccgggtctacgccgacggcatctacgacctcttccacttcggccatgccaagtcgctggagcaggccaagaagtcgtttccaaacacatatcttcttgttggatgctgcaatgatgagttgacacataaattcaaaggaagaactgttatgactgaggatgagcgatatgagtcacttcgtcattgcaagtgggttgatgaagtcattccagatgctccatgggtggtgacagaagagttcttggataagcataacattgattttgttgctcatgattctctgccgtatgctgatgctagtggagctggtaacgatgtttatgaacatgtaaaaaagcttggtaagtttaaggagactcagcgcactgatgggatatcaacatcggacattataatgcggattgttaaagattataatgagtatgttatgcggaatctggccaggggctacactagaaaggatcttggtgttagttatgtcaaggaaaaacgactgcgagtgaacatgggacttaaaaacctgcgtgacagagtgaaacagcaccaagaaaaagtaggggagaagtggagcacggttgcaaaactccaggaagagtgggtggaaaatgcagaccgctgggtggctggtttcttagagaagtttgaggaagggtgccactcaatggggacagccatcaaggagaggatccaggagaggctcatcaaggcacaatccagcgactttggcagcctcctacagtacgacagctacgattctgatgaagccaaagaaaacgacgaggacgaagacgaagatgaactctttgaagacgtcaaggaatag

SEQ ID NO: 147 - DNA, 357 bp, Zea mays
atggagaagtataacagcaagactcagttagcacccttgagagataccccatttgctctccgtggtgctcttggtagttcaagctcataccttgagcaagccaggggctacacgtcttcccctctagcagctctgcgaccaaagatgtcttctactactggaaatcgactcctgcactcgagttgccccctgtcatctcctgtagcaaaccgcccgctgtcgccccaccttcctctgaagaagccacagttcagcgcgactttctcaatctcgcatcgtatattcggtgtcgcgttgggagttgccatcgtatctgtccctctcgccaccaagttcagcctaatgtttggtgtctga

SEQ ID NO: 148 - DNA, 1587 bp, Zea mays
atggctcgtggcgacggcgggcagctggcggagctgtccgcgggggtccgcggcgcggccgcggtggtggaccacgtggccccgatcagcctcgggaggctcatcctcgccggcatggtcgccggcggcgtgcagtacggctgggcgctgcagctctccctcctcacgccctacgtgcagactctggggctttcacatgcgctcacttcattcatgtggctctgcggccctattgccggcttagtggtccaaccgctggttggcctgtacagcgacaggtgtacatcgagatgggggagacggaggccgtttatcctgacagggtgcatgctcatctgcgttgccgtcattgttgtcggattctcgtcagacatcggagctgctctaggggacacgaaggaacactgcagcctctaccacggtcctcgttggcacgctgcgatcgtgtacgttctggggttttggctccttgacttctccaacaacactgtgcagggtccagcacgtgctatgatggctgatctatgtgaccatcatgggccaagtgcggctaactccatcttctgttcttggatggcgctgggaaacatcctaggctactcctctggctccacgaacaattggcacaagtggtttcccttccttaaaacgagcgcctgctgtgaggcctgtgcgaacctgaaaggtgcatttctggtggccgtggtgttcctagtcctgtgcctgacggtaaccctgatcttcgccaaggaggtgccgtacagagcgaacgagaacctcccgacgacgaaggccggcggcgaggtcgagactgagcctaccgggccacttgccgtgctcaagggcttcaaggacctgcctcccgggatgccgtccgtgctcctcgtgactgccatcacctgggtatacgccattggccatacagactacctttcgtggttcccgttcatcctctacgacaccgactggatgggccgggagatctaccacggcgaccccaaggggagcaacgcccagatctcggcgttcaacgaaggtgtccgagtcggcgcgttcgggctgctactcaactcggttattctagggttcagctcgttcctgatcgagcccatgtgccggaaggtcgggccgagggtggtgtgggtgacgagcaacttcatggtctgcgtcgccatggcggccaccgcgctgatcagcttctggtcgctcagggactaccacgggtacgtgcaggacgccatcaccgcgaacgccagcatcaaggccgtctgcctcgtcctcttcgccttcctgggcgtccctctcgccatcctgtacagcgtcccgttcgcggtgacggcgcagctggcggccacccggggcggcgggcaggggctgtgcaccggcgtcctcaacatctccatcgtcatccctcaggtgatcatcgcgctgggcgccggcccgtgggacgcgctgttcgggaagggcaacatcccggcgttcggcgtcgcgtcggccttcgccctcgtcggcggcgtcgtgggcgtgttcctgctgcccaagatctccaagcgccagttccgggccgtcagcgcgggcggccactga

SEQ ID NO: 149 - DNA, 1293 bp, Zea mays
atgacgggtggatcgggtgtggtggtgatagacaatgggggtggtcttctcaaggctggctttgggggggacaatgatccaattgctgttgtccccaactgtatggccaaaccccctggtggcaatgccagctcgaagaaatggcttgtggctgaccagctgcaggcagaagatgtcgatgtgactggcatgactttgaagcgtcctattgaccgtggctatcttatcaataccgaggtgcagagggatgtgtgggaacgggttttgcgcaatcttctccaggttgatcctactaactcgtccttgttactggtggaacccatgtttaaccctccagcgatacagcatgcaactgatgagctagtgttcgaggagtttggcttcaactcgctttatgttgcagatggtccttcccttgtccacctttatgaggctagccgacaaccaatgatgtttcgtgcccaatgcagccttgttgttgactgtggcttctctttcacccatgcatcccctgtacttcagaactttactcttaattatggtgttcggcgtatggaccttggcggcaaggcccttacaaactatctcaaggagctcgtctcataccgttcccttaatgttatggatgaaactctcctcattgatgatgcaaaggaaaagctatgttttgtctcgcttgatgtccctggtgatctacaccttgccaggttatcatttaaggataacccttttagatgttcttatattctccctgatggtataacatacaagaaagggtttgtcaaggatatggatgaagcacttagatatcgcaccctgcctcaagtatcagatagcaaagaccatggtatggatacaaataagtccgaggatcggaaaaaggcagaattaagtcaaaatgaatttgtcttgacaaacgagaggttccttgtcccagagatgctttttcatcccattgatcttggcataaatcaagctgggcttgctgagtgtatagttcgtgctgtacaagcttgccatccatatcttcaacctgtgctttttgagagcatcatcttgacaggtggaagcacactgttccccagattcaccgaaagattggagagggaacttcggcctcttgtccctgacgactacaaggttaagataactcgtcaagagaacccaatttttggtgtctggagaggcggatctattctagcatcaagtcctgatttcgaatcaatgtgcataacgaagtctgagtacgaggagatgggatcagcacggtgccgacgaaggttttttcactga

SEQ ID NO: 150 - DNA, 321 bp, Zea mays
atgtgggggaaaggaaagaagcgtttcggcggtggcggcagcggtgagcccgcggccaagcgccaggccgcgagggacgatggcccctccgaatccgctgaagacggtaccgtcgtagccgagatatcgaagaacaagaaggtgtccgttaggagctggaaaggcagggtcttcgtcgacttacgcgagttctacttcaaggacggcaagactctccccacccgcaaaggtatatcactccaattagatcagtttttcttcgcagtgaaatgccaagatgcacacacgtatgccatgataacaatttctagctgctattga

SEQ ID NO: 151 - DNA, 1482 bp, Zea mays
atggacccgtacaagcaccgcccgtcgagcgccttcaacgccccgtactggaccaccaactccggcgcccccgtgtggaacaacgacagctccctcaccgtcggcgcacgaggtcccatcctgctggaggactaccacctggtggagaagctagccaacttcgaccgcgagcgcatcccggagcgcgtggtgcacgcgcgtggcgccagcgccaagggcttcttcgaggtgacccacgacatcacccacctgacgtgcgccgacttcctgcgcgcgcccggggtgcagacgcccgtcatcgtccgcttctccacggtgatccacgagcgcgggagccccgagacgctgcgcgacccgcgcgggttcgccgtcaagttctacacccgggagggcaactgggacctggtgggcaacaacttccccgtcttcttcatccgcgacggcatcaagttcccggacatggtgcacgcgctcaagcccaacccgcggacgcacatccaggacaactggcgcatcctcgacttcttctcgcaccacccggagagcctgcacatgttctccttcctcttcgacgacgtcggcatccccgccgactaccgccacatggacggatccggggtgcacacgtacacgctcgtcagccgcgccggcaccgtcacctacgtcaagttccactggcgccccacctgcggcgtgcgctcgctgatggacgacgaggccgtcgccgttggcggcgccaaccacagccacgccaccaaggacctcacggacgccatcgcggcggggaacttccccgagtggacgctctacatccagaccatggaccccgagatggaagaccgcctcgacgacctggacccgctggacgtgaccaagacgtggcccgaggacgcgttcccgctgcagcccgtgggccgcctggtgctcaaccgcaacatcgacaacttcttcgcggagaacgagcagctggccttctgcccgggcctcatcgtccctggtatctactactccgacgacaagctgctgcagaccaggatcttctcctactccgacacgcagcgccaccgcctcggccccaactacctgctgctaccggccaacgcgcccaagtgcgcacaccacaacaaccactacgacggatccatgaacttcatgcaccgccacgaggaggtcgactacttcccctccaggtacgacgccgtcaggaacgcgccgaggtacccgatcccgaccgcccacatcgccggccgccgagagaagactgtgattagcaaggagaacaacttcaagcagcccggggagaggtaccgcgcgatggacccagcaaggcaagagcggttcataaccagatgggtcgacgcgctctccgacccccgcctcacccacgagatcaggaccatctggctctccaactggtctcaggccgacaggtctctgggccagaagctcgcgagccgcctcagcgccaagccgagcatgtaa

SEQ ID NO: 152 - DNA, 2529 bp, Zea mays
atgtctgactggagctcgccggctgcgccgacgttcttcccttttggcccgcaggccgaggggtgggacgtcaccttcaaggtcaaatatggtgatacacttaaaaggttttatggttgtgccaatgggagtcattttgacatgaatttatctgctctacgggcgaggattgatactgcctttaagtttggtcctgacgttgactttgttctgacttacaccgatgaggatggtgatattgtcatgctagatgatgatgatgacttgcgtgatgcagctctccgtcagagattaaaccctctcaggattactgttcaactgaagaaaaatcaaccaactgaaaaaaaagatacttctgcaccagtgaaatccgctgctcaggatccactatcccagttaatgtcagctattgaaggtttgaagcctgttcaggaagatagtctggcccatataaaatcagctattggtgaagcaatcaagtctatcccagagccaatacctgatgcccttgcaaaactttctcatgaaatacttgatgcagcaccaccaccattagctgagctgatgaaaccttttgcacaattgatggcaccaaacaataatggcaatgggccatctgatgtgcatgctgaggggtcatctagctcttccagtgcacaggtgccagctgaagctaaaaatgagcccaaagttaggccaagtttgggtcttaagaccgtgttgaaagaggctgctggacctgttcctaatgctggagcttctcaggttcaacagccattaatgtatccatctgttgaggagatgctgttcccctgtaattcagtcgacaaatctgtttgcaaagggaagattgatgctcaaagtaagggaaaatctgttacgtcctcaggcatccaacctgctcctcattctcttcgtactcatgccccacctccaccacatccgtgcatttcagaatggtcccgagcacaaagaagccaacaccgtcaattgaaatttgaagacaatgcaaaagccactaatgattctagatggcgcattccgatgtataaaatgccctatgcaccaccacctccagcagtgccacccccaggctatgtaccttctccacattttccttatccaggccgcctcttatcttctgggcatccatacggagatctcgctggtaacatggaaaactcagcaccacatagtctgcatagatggattcagtgtgatggctgtggagcgcaaccaattgttggtccacgttataaatctaatgtgaaggaagactatgatttatgtgattcctgtttccagcgcatgggaaatgaaatggagtacaccaaaatagacaagcctattttaccccacaggtttctaagagatccccatgtgtaccggaaggtgcaccatccacgggttctaatgaagtcaagacgggagaaacttgaaagtcgcttcattttggatgtgactgttcttgatggaacactgatgacaccttctaccccgttcactaagatttggcgcatgcataacaatgggtctgttgtgtggccacggggcacacagcttgtctgggttggtggagatcagtttgcattgcagacatctgttccattagagattcctgtggatggttttcctgtggacaaagagattgatgttcctgttgattttgtggcacctacaaggccagggaggtacatatcttactggaggttggcttccccttctggtcagaaatttggtcagcgagtttgggttcatatccaggtggaagacccttcttttgttaatgacaataacaggaatgctgctattaacctgaatctgcctccagagagctatagttcaaacacaaccaacttaattgatgtgaacattgagcctgctgactcagcccttagtgcacatgctaagcgcacaaaggagttccatttctgttcaactgattttcctgaacccagtaagtctgtgccttttacgttggccactacctctttgtctgcagcagctcctacaaaccaaactggtgatgttcccatgtccagtacacctgctgctgcttgtttgccctctgttaatgtgcctatgcatgaagtcgttactactcatacaccgtcacctattacgcctgtcttgcctacaactatacacttttcagccccagtatctgctcctgcaattgcccctgagcttgcatcaggggctgttggtgtgcctccacctgttagtgctgtggtacctgagctgtcagaactggatgttcacaatgaggagaagttgctgagggagctggaggaaatgggttttaggcaggtcgatctcaacaaggaaatcctcaggcagaacaattacaatctggagcagtctgtcgatgacctatgtggcgtcaatgaatgggatcctctccttgcagagctggaagagatgggatttgatgacacagagatgaacaaggagctgcttgcgaagaatgagggaagcatcaagcgagctgtgatggagctcattgccagggagaagaaggacaagtga

SEQ ID NO: 153 - DNA, 1797 bp, Zea mays
atgtcagaggaggacgaggaccagccgccgcccaagcggccgtgcgcgtcgccgcccgcggaccaggtgctcgacaacgtgctcgagacggtgctccagttcctggacgccccgcgggaccggagcgccgcctcgctggtctgccgctcctggcaccgcgccgagtccgccacccgcgactccgtcgccgtccgcaacctcctggccgcctcggccacccgcgccgcgcgccgcttccccaacgcgcggagcctcctcctcaagggccgcccgcgcttcgccgacttcaacctcctcccgcacggctgggacgcctccgccttccgcccctgggccgccgccgtcgccgccgggtccttccccgcgctcacctcgctctacctcaagcgcatccccgtcaccgacgctgacctcgacctcctctcccgcccgctcccggcgtcattccgcgacctcacactgcacctctgcgacggcttcacctcgcgcgggctcgcctccatcgcctcccattgcaggggcctgcgagtgctcgacgtggtggagtgcgacatggccgaggagcaggaggtcgtggactgggtggccgcgttcccgccggagcccaccaacctggagtcgctctcgttcgagtgctacgagccgcccgtggccttcgccacgctcgaggcgctcgtggcgcggtccccgcgcctcagccgcctgggggtcaacctgcacgtctcgctcggccagctgcgccgcctcatggcgcacgccccgcgcttgtcgcacctgggcaccgggtcgttccgcccggcggaaggcggcgagggggaggcagagttcggggaggttgtctctgcattcgtgtccgctgggcgagcgcgcacgcttgtttctctctccggcttccgtgacctcgcgcaagagtacctgccaatcatcgacgtggtgtgctcccacttgaagagccttgacttaagctacgccgcggtcaccccgaatcagatcctgatgttcatcgggcaatgctacaaccttgagacgctatgggtacttgactcggtgcgcgacgaagggctcgacgccgtggggatttactgcaagaagctccagactcttcgcgtgctcccattggatgcgcatgaggatgccgacgagttggtatcggaggttggccttactgccatcgcacggggctgccctgctctccgttcaatactatatttttgccagacaatgaccaacgctgctgttgtcgacatgtcgcgccactgcccggagctcaaggtattccggttatgtataatgggacgacaccagccggaccatgcgactgaggagcccatggatgaaggattcggtgccattgttaagaactgtaggaagcttaccaggctatccacgtcggggcaacttactgaccgggcgtttgagtacattggcaggcatggcaagtccctgcggacgctctctgtagcgtttgctggaaacagcgacgtggcgctgcaatacatcctccggggctgctcaaagctcgagaagctggagataagggactgccctttcggtgatgccggcctcctctctgggatgcaccagttctataacatgcggttcgtctggatgtcaggctgcaacctgaccctgcgggggtgcaaggaggtggctcgggggctaccacgaatggtggtggagttgataaatggccagcctgatgagagcgagaggaaggaaagtgtggacatcttatacatgtatcggtcactcgatggtccaagggaagatgtaccaccatttgtgaagatcctgtga

SEQ ID NO: 154 - DNA, 660 bp, Zea mays
atgacggcggagggggaggccaagaacccgtcggccggtggcggaggggataacccccagcaccagcaggctgcgccggcgccggcgccggcacagggggaagtggcgcaggaggctgcagtgcaggggacgggacaagagcaggagcgggacaaggcggatcgagaggtgcagggcggcgcgggggagaaggacgacggcgcgtgcagagatctggtcctggtcgaggatccggaggtcctcgccgtcgaggatccggaggaagctgcagcaaccgcagcactccaggaagaaatgaaagcgcttgtggcatcgatccctgatggtgctggagcagcattcacagccatgcagcttcaggagctagagcagcagtcccgggtgtaccagtacatggctgcccgagtacctgtgcctactcacctcgtcttcccggtatggaagagtgtgaccggtgcatcctctgaaggcgcccagaagtaccctactttgatgggcttagcaacgctctgcttggactttgggaagaacccggaaccagaaccagggaggtgtcggcgaacagatggttttcctggaggacgacgagcccgattctgcttcagggtcaaaacccgccgctcctggcaaggctaccgaaggtgccaagaaggccgatga

SEQ ID NO: 155 - DNA, 1188 bp, Zea mays
atgtggctggaagaggtgaggcggagggagcgtggagagcttcgcgctcggcggtttgaggccgccgcccgagcgtgccgcacggcttcgctcgcgctctccaatcgcaaggagtttgtcaccccacatcacggcgccgtcaactcgctccaggttgatttgacagaggggaggtacctgctctccggggcatcggatgggtcggccgctgtgttcgatgtgtggaacgcgactgaatacgaaaccgggttcatagcaaagcacaggaacatactgcttgtggacaagcaacaccagaatggccacaagttcgccatctcggcggccgtttggtatcctgtggatacggggctgtttgtcacagcatcctttgaccagtttgtcaaagtttgggatacaaattcgactcaagtcgtcatggaatttaagatgcctggaaaagtgtacactgcagccatgtctccaatcgcaacaacgcacgtgctcattgctactgggagtgcagatgttcagtggtctgcctcaagtgagtggattttgatgagtggtggctgtgacggggcaatacgtttttgggacattagaagagctggatgctttcgggttctggaccaatcaaggtctcaacttggaaaaaggccccttgttaaaagtgctctatataaggatcacacagattccttaggaccttcaccttccgcaaggagaaggacaggcatttctaagaagagttcatcagctttgcgcaaaattcaaaacccgacacatggacacatgcaacagagattgcatcctggtttgtcatctagtcaaaaccgtgctactgctcattatggtgctgttactggtttacgaacaactgcagatgggatgtaccttcttagctcaggatctgattctcgcttaagactatgggacatcgattcaggctgcaatacgctggtcaattttgaagctatgcgattgcagacaggcaagccattacaattagctgtcactgaggatccttcacttgtatttgttccatgtatggcaagcatcaaggcatacaatttatggtctggtaaaacatttcaaacattccgggggcactatgaacttgtgagttgctgctactatagtgaacaggaccaagaagatgatgacaagatcctttctgcagctgatgaggataactggagcgactga

SEQ ID NO: 156 - DNA, 1413 bp, Zea mays
atggcccacccctccgccgccgccgccgccgtatcctccacggcgcccgctgcaaaccctagttctggcgcccgcgaggaaggaggcgcccgctctccgccgtcgccgtctccgtctcagagggggcgggccaaggtggtgatcgttatgggcgccacgggcgccggcaagtcgcggctggccgtcgacctcgcggcccacttcgccggcgtcgaagtggtcagcgccgactccatgcagctctaccgcggcctcgacgtcctcaccaacaaggctcccctccacgagcagaacggtgttcctcatcatctacttagcgtgattgatccctctgtcgagttcacttgccgtgatttccgcgaccgtgccgtgccgattatacaggaaatagtggaccgcggtggcctccctgtggttgtcggcggcacaaacttctacatccaggctctcgttagcccattcctcttggatgatatggcagaagaaatgcagggctgtactctgagagatcacatagatgatggtcttactgatgaagatgaaggcaatgggtttgaacgcttgaaggagatcgatcctgtggctgcgcagaggatccatccaaacgaccatagaaaaatcaaacgctacctcgagttgtatgcaaccacgggtgccctacccagcgatctgttccaaggagaggccgctaagaaatggggtcggcctagtaactccagactcgactgctgtttcctgtgggtagatgctgatcttcaagtcctggacagttatgtcaacaaaagggtcgattgcatgatggatggtggcctgctggacgaagtatgcagcatatatgatgcggatgctgtctatacccaggggctgcggcaggctattggggttcgtgagtttgacgagtttttcagagcatatttacccagaaaagaatctggtgagggttcctgtgcaagcctgttaggtatgcatgacgatcagcttaagagcttgttggacgaagctgtttcccagctgaaggcaaacactcgtagactagttcgacgtcaaagacggagattgcatcggctgagtaaagattttgggtggaacttgcatcgtgttgacgcaaccgaagcattcttctgtgccactgacgactcatggcaaaagaaagttgtcaaaccatgtgtggatgtcgtaagaaggtttttgtcggacaattccactgttttgccaagcacaagcgcaagtgacccctcttcaagagagctgtggacgcaatatgtgtgcgaggcctgcggcaaccgggtgctgcgaggtgcgcacgagtgggagcagcacaggcaagggcgaggccaccggaagcgagtgcagcgcctgaagcagaagagcctgaggccatggccatcgctgctgccccaagaccgcagctga

SEQ ID NO: 157 - DNA, 1413 bp, Zea mays; identical to SEQ ID NO: 156

SEQ ID NO: 158 - DNA, 1011 bp, Zea mays
atggcgatcgccgccgtccccgcctccctccccttcgtcctcctccctccgaggctgttccgcgggagggcggtgaggtggccgcgcccgattagggcttcggcgtcgaccaacgccggtgacgttgcaggcggagagcggaagtttggggctctggtgagcagggtgggagatctgagggcgctcgtagcctccgtgcctcctgctgttgcttcgatgcagaaaaacattggcccaaattttgttgctggtttctgtgttagcatggcatttgtggctgctgctgcaagacagatctccttaagaagtcgagagcatgttagtaaaggttctgttgctgatcttgtaaggcgtggccagttaaaatcagggcaacgagggattgcaaagctccgtacatacgatgatcctttcaataacccgttagtaaagattgatgagggtacatctactgcacaaatgtttggcaaggagtaccgtttggctcctgttaggcttacgaaagagcagcaagaaatgcaccagaacaggagatcgcgtgcatatcagtggaaaaggccaaccgtgtttctcagggaaggtgattccttacctccagatgttgatccggatacagttagatggattccagcaaaccatcccttttctgctgcttcaagtgaagtggatgaggagaccgccaaacaaaatgtctaccaaaaggatggcatcccatcccgtgtcaaggctgagcatgaagctttgcaggcaaggctagaggcctcaaacgatgttaccagactcccttcggatccaaggagtattcagcgtaatgagagaccaatgagattgtcaggcaagccatctgaacatcttcagagctccaagtttgagaaccaagatagacaactggctactgagtctggtaaacatagctctgaatctctgatggatgtttacaatcaaacgagccggaagggcaataaaaattgtgtacttcagctcttcgaagacatttgctttgttacgtag

SEQ ID NO: 159 - DNA, 1347 bp, Zea mays
atggagcgggcgcgggcgcgggcgccggctctggctctggcgccggtggaggttcccaagttcttcgtgtgcccgatctcgctggaggtcatgcgggacccggtcacgctgtcgtcggggatcacctacgaccgcgacagcatcgagcgctggctgttcaccgacgggcacggcgactgccccgtcaccaagctgccgctgggcgccgacgacctcgagcccacgcccaaccacacgctccggcggctcatccagtcctggtgcgccgcgcacgccgtcgagcggttccccaccccgcgcccaccggtcgacgccgaccgcgtcgccgcgatcgtgggctgcgccaagaagggtggccagcaggaagtgctggccgcgctcagggagctcgcggacatcatcggggagagcgaccgcaaccggcgctgcgtcgagggcgtgccagaagccgtggagttcctcgtgtccgtcgtcaagaaacacgccgcaggcacgtcgtcgtccaagcctctcggcggatgcagatcccaagaggagccgatgtgcggcgtgccggactcccctaaggcgtgctcgccggaggaggcggctctgagcatcttgcattctctcaagctctccgaggcgagcctgaagagagccttggagagcagcgacggtttcgtggacaccttagcgtccgtgctgcgctggccgccgaactaccgggcgcgcacgtacgcgatgcacctgctgaaggcggcgctgtcggcgatgcagccctcgcagctgagctcggcgagcacggatctggtcgagggcgtcgtgagggtggtggcagaccggacgttgtcgcccaaggcgatcaaggtggcgcttcacgtgctctgccggctttgcccgtggggccgcaaccgcgtcaaggcagtcgaggccggcgccgtggcggcggtggtggagctgctcctcaacgtggggtgcgggtgcggtggcagcaacggcaagcgggcggtggagctcgcggtggttgccatcgatcatctgtgcggctgcgcagaagggcggttggagctcgtggcccacccggcagggctggctgttgttgcgcgagccgcgacgcggctgtcccccaccgccaccgagagcgcggtgcgcgcgctgcacgcggtggccaggcactccgcgacccccgcggtgctgcaggagatgcttgccgtcggagtagtagcgaggctgctgtacctggtgcaggccggcgcatcgggcgagcgcccgagggagagggcgcgggagatgctcaagatgcacgccagagtttggaggggctcgccgtgcttggcgtcgcacatggcatcctacccttgttga

SEQ ID NO: 160 - DNA, 513 bp, Zea mays
atggcgcccaccgtgatgatggcctcgtcggccaccgccgtcgctccgttccaggggctcaagtccaccgccagcctccccgtcgcccgccgctcctccagaagcctcggcaacgtcagcaacggcggaaggatccggtgcatgcaggtgtggccggcctacggcaacaagaagttcgagacgctgtcgtacctgccgccgctgtcgacggacgacctgctgaagcaggtggactacctgctgcgcaacggctggataccctgcctcgagttcagcaaggtcggcttcgtgtaccgcgagaactccacctccccgtgctactacgacggccgctactggaccatgtggaagctgcccatgttcggctgcaacgacgccacccaggtgtacaaggagctgcaggaggccatcaaatcctacccggacgccttccaccgcgtcatcggcttcgacaacatcaagcagacgcagtgcgtcagcttcatcgcctacaagcccccgggcagcgactag

SEQ ID NO: 161 - DNA, 513 bp, Zea mays; identical to SEQ ID NO: 160

SEQ ID NO: 162 - DNA, 1119 bp, Zea mays
atgtcggcgaggctacgggtggcggagctccgcgcggagcttcagcgccgcggcctcgatgtatccggcaccaagcctgctctcgtgcggaggctggacgccgcaatttgcgaggcggagaaggccgtggtggctgctgcgccaaccagtgtggcaaatgggtatgacgtagccgtagatggcaaaaggaacggcgggaataataagaggaaaaggtccggggatgggggtgaagagggaaacggcgatacgtgtacagatgtgacaaaactagagggcatgagctatcgtgagctgcagggattggccaaggcacgtggagttgcggcaaatgggggcaagaaagatgttatccagaggttgctctcggcgactgctgatcctgctgcagttgcagatggtggtcctcagggcgaaaaggaagtcataaaaggtggtgatgaggaggttgaggtgaaaaaggagaagatggttactgccacgaagaagggagctgcagtgctggatcagcacattcccgatcacataaaagtgaactatcatgtcttgcaagtgggcgatgaaatctatgatgccaccttgaaccagactaatgttggagacaacaacaataagttctatatcattcaagttttagaatctgatgctggtggaagctttatggtttacaatagatggggaagagttggggtacgaggtcaagataaactacatggtcccttcccaacacgagaccaagcaatatatgaatttgaggggaagttccacaacaaaaccaataatcattggtctgatcgcaagaacttcaaatgttatgcaaagaaatacacttggcttgaaatggattatggtgaaactgagaaagaaatagagaaaggttccattactgatcagataaaagagacaaaacttgaaactagaattgcgcagttcatatccctgatctgcaatattagcatgatgaagcaaagaatggtggaaataggttataatgctgaaaagcttccccttggaaagctaaggaaagctacaatacttaagggttatcatgttttgaaaaggatatccgatgttatttcaaaggcggacaggagacatcttgagcaattgactgggtaa

SEQ ID NO: 163 - DNA, 429 bp, Zea mays
atggccgggatcgggccgatcaggcaggactgggagccggtggttgtgcggaagaaggcacccaccgccgctgccaagaaggatgagaaggccgtcaacgccgcgcgccgctccggcgcggagatcgagaccatgaagaagttcaacgctggtatgaacaaggcggcgtccagcggcacatccctcaacaccaagcgcctcgacgacgacacagagaacctcgcccatgagcgagttccaagtgacctgaagaaaaatctcatgcaagcaaggctcgataagaagttgacccaggcacagcttgctcagatgatcaatgagaagccacaggtgatccaggagtatgagtcaggcaaggcaattcccaaccagcagatcattggcaagctcgagagggccctgggaacgaagctgcgtggcaagaaataa

SEQ ID NO: 164 - DNA, 714 bp, Zea mays
atggcggcgtccgcgaggcccggggagagggcgaccagcttcgccgtcgcgtgcagcctcctcagccgcttcgtccgccagaacggcgccgcgcccgcccagctaggcctcgggatcaaaggcgaggtcgagcagcaaaggacgccggcgacaattaacttgctccccggagcggacggcgaggagaccgagaggaggaaggagaccatggagcttttcccgcagagcgccgggttcggtgtcaaggatgccgctgctgcccctagagagcaagaaaataaagagaagcctaaacagctcacaatcttctatggcgggaaggtgctggtgtttgacgatttccctgccgacaaggcaaaggacctgatgcagctggccagcaagggcggccctgtggtacagaacgttgttttgcctcaaccctctgcacctgctgctgctgtcaccgacaaggccgtgccggtccccgtcatcagcttgcctgctgctcaggctgatgctaagaagcctactcgcacaaatgcctctgatatgccaattatgaggaaggcttctcttcaccgcttccttgagaagagaaaggaccgtctcaatgcaaatgcaccataccaaacttctccttcagacgctgcaccagtcaagaaggagcccgagagccaggcatggctcggattaggaccgaatgccgtcaagtccaacctgaacctgagctag

SEQ ID NO: 165 - DNA, 702 bp, Zea mays
atggaacaatacgacgggctctttcctcccgcctacgtggactcctcctcatccctcctcctggtgcccaacgccaacggcactgcgcaggaggagagaccgagagcgcggcgcaggaggcgtcgagcagcgaggtgcggcggcggcggtggcgagctggacggaggaggggaccacaagaagcggcggctgaccgacgagcaggtagagatgctggagctgagcttccgggaggagcggaagctggagaccggccggaaggtgcacctgggcgccgagatcgggctcgacccccagcaggtcgccgtctgggtcccgaaacgccgcgccccgcccaagagaaagctgctcgaggaagaagtcggccagtacatatataatattgagcatgcctttcgtgggcacatgcccggctggaaggtgacgaggctgaaggacaagctggtgctcgccgaggaggagctgacacgattcagatccgcgggcaatgacgcggtctccggtgacggcggagacgtcatggcccgtgccgtctgcagcgggagcccgagctcatcgttctcgactggcacctgccagcagcccggaggaggcggcggcggcggcgatcacctgggggacgacgacctgctctatgttcctgactatgcctacgctgacagcagcgtggtcgagtggtttagcctgtatggactgatgtaa

SEQ ID NO: 166 - DNA, 1086 bp, Zea mays
atggccgcgtcggatctggagagcaaggccaaggaggccttcgtcgacgacgacttcgagctggccaccgagctctacagccaggccatcgacgccgggcccgccaccgccgacctctatgccgaccgcgcccaggcgcacatcaagctcggcaactacactgaggctgtggcggatgctaacaaagcaattgagcttgatcctatgatgcataaagcttactaccggaaaggtgctgcatgcattaagcttgaagaataccaaactgcaaaggctgctcttgagttgggttcttcttatgcatcaggcgattcaaggtttgctcgtctattgaaggaatgtgatgagcgcatcgctgaggaatctagccaggcaccagtaaagaatgttgaggctactgtggctgctactattgaggacaaggaggatttcacaaatatggagaatacaccaccagtgatagaacccccaagcaaaccaaaatacaggcatgactactacaacagtgccacagaagtggtactgacaatatttgctaagggtgttcctgctgatagtgtagtcattgattttggtgaacagatgttgagtgtatccattgaagttcctggtgaagaaccataccattttcagccccgtctgttttctaagattatccctgagaaatgcaaatatcaagtcttatccaccaaggtcgaaatacgccttgcaaaagctgagcaggtgacatggacaaccctggattatagtggaagaccaaagactgttccccagaagataagcacgccagctgaaacagccccaagaccttcatacccatcttcaaaggcgaaaaaagactgggataaactggaagctgaagtcaaaaaggaggagaaggaagaaaaacttgatggtgatgctgcattgaacaaattcttccgtgacatctacaaggatgctgatgaagatatgcggagggccatgatgaagtcattcgtggaatcaaatggcactgttctctcaaccaattggaaagatgttggagcaaagaaggtagaagggagcccccctgatggtatggagctcaagaagtgggaatactaa

SEQ ID NO: 167 - DNA, 1767 bp, Zea mays
atggccgatgttcagccggaatctgggccagatggcaaggctctgatggacgcatgggactacaagggtcgtcctgcttcccgtgccaccaccggcggatgggcgtgcgccgccatgaccctaggtgtggagctgttcgagcggatgacgacgctgggcatcgcggtgaacctggtaccctacatgaccggcaccatgcacctcggcaatgccgctgccgccaacaccgtcaccaacttcatcggcgcctccttcatgctctgcctcctcggcgggttcgtcgccgacacctacctcggccgctacctcaccatcgccatcttcaccgccgtccaggccacgggcgtggtgatcctgacgatctcaacggcggctcccgggctgcggccgccggcgtgcggggccgcgagccccaactgcgtgcgggcgaacaagacgcagctcggggtgctctacctggggctgtacctgacagcgctcggcacgggcgggctcaagtccagcgtgtcgggcttcggctccgaccagttcgacgaggcgcacgacgtcgagcgcaacaagatgctgcgcttcttcaactggttctacttcttcgtcagcatcggcgcgctgctggccgtcacggtgctggtgtacgtgcaggacaacgccggccgccgctggggctacggcgtctgcgccgccggcatcctctgcgggctggccgtcttcctgctgggcacccggaagtaccggttcaggaagctggttgggagcccgctcacccaggtggccgccgtgacggtcgccgcctggagtaagcgcgcgctgccgctgccgtctgatccggacatgctctacgacgtggacgatgtggctgccgccggctccgacgccaaggggaagcagaagctgccccacagcaaggaatgccgattgcttgaccacgctgccatagtcggcggcggcgagtcaccggcgacggcgagtaagtgggcgctgtgcacccggacggacgtggaggaggtgaagcaggtggtgcggatgctgcccatctgggccaccaccatcatgttctggaccattcacgcgcagatgaccaccttctcggtggcgcaggccgaggtcatgaaccgggccatcggcggctcgggctacctcatccccgcgggatccctcaccgtcttcctcatcggttccatcctcctcaccgtgcccgcctacgaccgcctcgtcgcgcccgtcgcccaccgcctcacggggaacccgcacggcctcaccccgctgcagcgggtcttcgtcggcctcctcctctccgtcgccggcatggccgtggccgcgctcattgagcgccaccgccagaccacctccgagctcggagtcaccattacagtgttcctgctcatgccgcagttcgtgctcgtcggcgcgggcgaggccttcacgtacatgggccagctcgctttcttcctgcgggagtgccccaagggcatgaagaccatgagcacaggcctgttcctcagcacctgcgcgttcgggttcttcttcagcacgctcctcgtcaccatcgtgcacaaggtaacgggccacggcggacgcggcggttggctcgccgataacatcgacgatgggaggctcgactacttctactggctgctagccgtgatcagcgccatcaacctcgttctcttcacgtttgccgccaggggctacgtctacaaggagaagcgcctggccgacgccggcatcgagctcgctgacgaggagtgtgtcgccgccggccactga

SEQ ID NO: 168 - DNA, 969 bp, Zea mays
atgagcgcactggagaaagcagagtccacagtgttcgtggcatcggggatgtatgcagctgtggctatgctcagtgcacttgttccggctggtgggcacattgtgaccaccacggattgctaccggaaaacaaggatttacatggaaactgagctccccaagaggggaatttcgatgactgtcattaggcctgctgacatggatgctctacaaaatgcgttggacaacaataatgtatctcttttcttcacggagactcccacaaatccatttctcagatgcattgatattgaacatgtatcaaatatgtgccatagcaagggagcgttgctttgtatcgacagtacttttgcctcccctatcaatcagaaggcactgactttaggcgctgacctagttattcattctgcaacaaagtacattgctggacacaacgatgttattggaggatgcgtcagtggcagagatgagttggtttccaaagtccgtatttatcaccatgtggttggtggtgttctaaacccgaatgctgcgtaccttatccttcgaggcatgaaaacacttcatctccgtgtgcaatgtcagaataacactgctcttcggatggcccagtttttagaggaacatctaaagattgcccgtgtctactatcctggcttgcctagccaccctgaacatcacattgccaagagtcaaatgactggctttggtggtgtggttagttttgaggttgctggagactttgatgccacaaggaaattcatcgattctgttaagataccctatcatgccccttctttcggaggctgtgagagcataattgatcagcctgctatcatgtcctactgggattcaaaggagcagagggacatctatgggatcaaggacaacctgatcaggttcagcattggagtggaggattttgaggaccttaagaatgatcttgttcaggccctcgagaagatataa

SEQ ID NO: 169 - DNA, 1866 bp, Zea mays
atgggtgccgcgctcttggcttcttggccatgggacaacctcggcttctacaagtacgtcctgtacgggccgctggtgggcaaggcggtggcgtcacgggcgtgggaggcggcgagccccgaccgctggatcctcctcctgctcctcctcttcggcctccgcgcgctcacctaccagctctggagctccttcagcaacatgctcttcgccacacgccggcgccgcgtcgtccgcgacggcgtcgacttcgaccagatcgacaaggagtgggactgggacaacttcctgatcctgcacgccctgatggcggccgcggcgctgtgcgcgttcccgtcgctgcggcatctcccggcgtgggacggccgggggttcgccgtcgcgctcgtcgcccacgcggcggccaccgagcccctctcctacctggcgcacagggcgctccacggcagcagcggccgcctctacgcgcgctaccactcgctgcaccactccagcagggtgccgcagccgttcacggcggggctggccacgccgctggagcacgtggcgctgggcgcgctcatgtcgctgcccctcgcggccgcgcgcgccgccgggtgcgcctccgtcgcgctcgccttcgcctacgtgctcgccttcgactccctccgcgccatgggccactgcaacgtcgaggtcgtcccggcctcgctcttccgggccatcccggccctcagatacgttctctacaccccgacgtaccacgcgattcaccacaccaagaaggaggccaacttctgtctcttcatgccgctgttcgatctgctgggtggcacaatcgaccgacgctcgtgggacatgcagaggaagatgagcgcaggtgtggacgaggtgccggacttcgtgttcctggcgcacgtggtggacgtgatgcagtcgctgcacgtgcccttcgtcatgcggaccttcgcctccacgcccttctccgtgcagctcttcctgctgcccatgtggcccttcgccttcctcgtcatgctcgccatgtgggtctggtccaagaccttcgtcatctcctgctacaacctccgcggacggctgcaccagatctgggccgtccccagatacggcttccagtacttcttgccgtttgccaaggacggcatcaacagacagatcgaactggccatcctcagggccgacaagatgggcgtcaaggtcctcagccttgcagccctgaacaagaacgaggcgctcaacggcggcggcacgttgttcgtgaacaagcaccctgacctgcgcgtgcgcgtcgtccacggcaacacgctgacggcggcggtgatcctgaacgagatccccaagggcacggcggaggtgttcctgacgggcgccacgtccaagctcggcagggccatcgcgctgtacctgtgcaagaagagggtccgcgtcatgatgatgacgctgtcgacggagcggttccagaagatccagaaggaggcgccggcggagttccagcagtacctggtgcaggtgaccaagtaccggtccgcgcagcactgcaggacgtggatcgtcggcaagtggctgtcgccgcgggagcagcggtgggcgccgccgggcacgcacttccaccagttcgtcgtgccgcccatcatcggcttccgccgggactgcacctacggcaagctcgccgccatgcggctgcccaaggacgtgcggggcctcggcgcctgcgagtactcgctggagcgcggggtggtgcacgcgtgccacgccggcggggtcgtccacttcctcgagggctacacgcaccacgaggtgggcgccatcgacgtcgaccgcatcgacgtcgtctgggaggccgcgctcaagcacggcctccgccccgcgtga

SEQ ID NO: 170 - DNA, 1017 bp, Zea mays
atgtcgatgagcttcttgagcatggtggaggcggagctgccgccggggttccggttccacccgagggacgacgagctcatctgcgactacctcgcgcccaagctcggcgccaagcccggcttctccggctgccgcccgcccatggtcgacgtcgacctcaacaaggtcgagccatgggacctccccgtggcggcgtcggtggggccgcgggagtggtacttcttcagcctcaaggaccgcaagtacgcgacggggcagcggacgaaccgggccacggtgtccgggtactggaaggcgacggggaaggaccgacccgtggtggcggcgcggcgaggcgcgctggtggggatgcgcaagacgctcgtgttctaccaggggagggcgcccaagggcaggaagacggagtgggtgatgcacgagtacaggatggagccagctgctcctcttcttgatcaccaaccctcctcatccaactccaaggatgaagattgggtgctgtgcagagtcatctgcaagaagaaactggcagcaggaggccgcgcaggagggggcagctcgaggagcctggtcgccagcaacggcggccgcgagaccgcgccagccaccccgccgccgccgccgctgccacctcgcatggacacggacgccaccctagcacagctccaggccgccatgcacgccaccgccggcgcgctcgagcaggtgccctgcttctccagcttcaacaacaacactgccagctctagagctgctgccgcagcagcagcagcgcagccatgctacctgcccagcatggccacaggcggcagccacggcacgacgagctactacctagaccacgcgatgctgccgcctgagctgggtggctgcttcgatcctctccacggcgacaagaagctgctcaaggcggtgctgggccagctcggcggcgacgcggtggcgccgggcctgagcctgcagcacgagatggccgcgggcgctgtcgtcgcttcatccgcttggatgaatcacttctag

SEQ ID NO: 171 - DNA, 1329 bp, Zea mays
atggagccgcccgcctcctcgccggcaccgccaaaccctaacccagtccccgacgatcggccgctgcagcagcaggtggaagaggcgcgggcgccggagccggagccggagcgggagacgtcgccgacgtccctgaccacctcaatcgatcccaccccttccggcggcgaggagagcgagagcgatgactcctcgtcagtctcgtcggcgccctcctccgcctccgctcccgcggccgctgcgcccttccccacggccaaggacctcctccacatctccttcaaccaggactacggctgcttcgcggcgggcaccaagtcgggcttccgcatctacaactgcgaccccttccgcgagatcttccgccgggacctcgccgccgatggcggcggcgccgggggagggggtatcggcgtcgtcgagatgttgttccgctgcaacatactcgcgctcgtcggcggcggcgataacccccactacccgcccaacaaggtgatgatctgggacgaccaccagagccggtgcattggggagctctccttccgctcccccgtccgaggcgtccgcctccggcgcgaccgcatcatcgtggtgctcgagaacaaaatcttcgtctacaactttgcggaccttaagctcgtgcaccagatcgagacggcgcccaaccccaagggcctctgcgctgtgtcgcagcagcccgggtcaatcgtgcttgtttgccccggtgcccagaaggggcaggttagggtggaacactatggggcaaggaagaccaagtttatcaatgcacacacttcccgcgtctcgtgcttcgcgctgtcgcaggacgggaggctcattgcaactgctagcaccaagggaacacttgttagaatctacaatgcagctgaaggcaatctcttgcaggaagtaaggagaggtgctgatagagcagaaatatatagcttggctttctcgaataatttgcagtatttggctgtgtccagtgataaaggaacaatacatgtcttcaatctaaagataaatgtgggatcgactgcaaatgataaacctatacctgctccagatcctgaagtttcgcatataagcccccctctttcgttcattaagggtgtgttgccgaaatatttccactctgagtggtcagtagctcagttcaggctccatgagggggagcagtacattgttgcatttggacatgagaagaataccgtgtcagttgttggtatggatggaagcttctacagatgtcaatttgacccagttaatggaggagaaatgctgcagctggagtgctacagttttctaaaaccgtcagatcaaccgtag

SEQ ID NO: 172 - DNA, 750 bp, Zea mays
atggccggcgcagagccgccgcctgatcttatcgcccgcgcacaaattaccacatgcgcggcgcgcaccggatccgacgtcacgtcgacctcatctccaagcctcttccaaacactccaatgcctggatgactgggtgctgtgccggatctacaacaagaagggtgttatcgagcggtacgacacagtggacgacgacgacggcgacggcgccgtggccgaagacgtcaagccggtgccggcgccggcggcgtcgaagaacccgcgtgccagtgcccgcgtaggggcagcagcggcggcgccgatgaaggtggagctccccgagtacggcggcggctactacgactacgacgacctggagacgccgtcggcggggatgctgtgcttcgaccgcccgtcggccccggcgcccgcggaccgcgactcaaacaactccgtgccgtggacgacgcaccacacgcacacggacaactccagcagcggctccgagcgcgtgctctcgccgtcgccggacctgcccgaccgcgaccacgccgagagccagcccgccgccgccgccgccgccgccgggtggtggcctgtcggaggcgactggggcagcgccgccgaggacgggttcatggtcgacgtcgacgtcgacgacgggagctcgctgttcgggccgctgtccccggggctgttcgcgcgcgtcgacgccgccgcgttcggcttcggcgacatgctcgcgtcgtacctgcacaaaccgttctga

SEQ ID NO: 173 - DNA, 168 bp, Zea mays
atgctggacaagctgtgggacgacgtggtggccgggcctcgcccggagacgggcctcgagaagctccgcaaggccaccaccgcccgcccgctcgtcatcaacaaaggctctacagcgacgagaccaggagcaaccaccgctagatcgggcgagatggatggacagtga

SEQ ID NO: 174 - DNA, 795 bp, Zea mays
atggactccagcttcctccctgccggcgcggacaatggctcggcgggcggcgccaacaatggcggcggcgctgctcagcaggcgccgccgatccgcgagcaggaccggctgatgccgatcgcgaacgtcatccgcatcatgcggcgcgtgctgccggcgcacgccaagatctcggacgacgccaaggagacgatccaggagtgcgtgtcggagtacatcagcttcatcacgggggaggccaacgagcggtgccagcgggagcagcgcaagaccatcaccgccgaggacgtgctgtgggccatgagccgcctcggcttcgacgactacgtcgagccgctcagcgtctacctccaccgctaccgcgagttcgagggcgaggcgcggggcgtcggcctcgccccggcccctccgcgcggcgaccaccaccaccaccaccactccgtgccgccatcgatgctcaacaagtcccgcgggcccggctccggagccgtcatgctaccgcaccaccaccaccacgacatgcacgcctccatgtacgggggcgccgtgcccccgccgccgcaccacggcttcctcatgccacacccacagggcggccactacctgccttacccctacgagcccacgtcgtacggcggcgagcacgccttggccagcgggtactatggaggggccgcgtacgcgccgggcaacaacggcgggagcggcgatggcagcggcgggagcgcgtcgcacgcaccgccgggcggcagcggcggcggcttcgaccacccgcacacgttcgcgtacaagtag

SEQ ID NO: 175 - DNA, 2061 bp, Zea mays
atggcggcggcaaaggcgcggggaggggagttccccgtgggcatgaaggtgctggttgtggacgacgacccgacgtgcctcgttgtgctcaagaggatgctccttgagtgccgatatgacgtgacaacatgtcctcaggctacaagagcactaactatgttgcgagagaataggcgtggttttgatgttataataagtgatgtccacatgccggatatggacggattcaggctacttgaacttgtaggccttgagatggaccttccagttatcatgatgtctgctgattcaagaacggatattgtaatgaacggaattaagcatggagcatgtgactatttaataaaacctgtcagaatggaggagctgaaaaacatctggcaacatgttattaggaaaaaatttaatgaaaacaaggaccatgagcattctggtagcctagatgacaccgatcgtaacagaccaaccaataatgataatgaatacgcttcctccgcgaatgatggaggtgatggcagctggaaatctcagagaaagaaaagagagaaagaagatgatgaaactgacctcgaaaatggtgatccttcttctacatcaaagaaaccaagagttgtttggtcagttgagcttcatcaacaatttgtgaatgcagtcaatcacctcgggatagacaaagctgtcccaaagaaaattttggaattgatgaatgtcccaggcttaaccagggaaaatgttgccagccatttgcagaaattcagactctacctgaagagaattgctcagcatcatgcaggaatacctcatccatttgttgcgcctgtatctagtgctaacgttgctccgttaggaggactggaattccaagctttggctgcttctggtcagatccctcctcaagctctggctgctttgcaggatgaactccttggtcgacctacaagcagtttggcgttgcctggaagggaccagtcatctttgcgagtggctgcaatcaaaggaaacaagcaccatgaagaaagagaaatagcatttggtcaacccatatacaagtgtcagaataatgcatatggtgcattccctcaaaacagcccagcagttggaggattgcaaccttttgcagcttggcccaataacaaagttggtatgactgattcaacaagcacattgggaaatgtgggcaattctcaaaatagcaatatgctattgcatgaattgcagcaacagccagacaccttgctgttaggaacccttcacaatattgatgccaaaccttctggtgtagttatgccatctcagtcgttaaatacattcccggctagtgagggtatctcacctaatcaaaatcccttgattataccatctcaacccccaagttttgtgtcatcaattcctccatccatgaaacatgaatctcttcttggattaccttcaacgtcaaccagtctgttgggcgggcttgatatggttaatcaagcttcaacaagtcaggctttgattagtagccatggaacaaatcttcctggtctcatgaaccgtagctcaaatgcaatcccttcaccaggaattagtaattttcaaagtggaaatattcattatgttgttaatcagaacgctatgggagttagctctaagccaccaggtgttctaaagaccgagagcactgactcactgagttgtagttatggctatattggtggtagcaccagtgtggactctggcttgttctcttctcagtccaaaaatccacagtatgatctactgcagaatcaaaatgatgttaacggcagctggtcgccttcacaagattttgatagttttggaaattctcttgggcaaggccaccctggtaccacttcatctaacttccagagttccgcccttgggaagttgcctgaccaaggacgagggagaaatcatgggtttgtcgggaaaggcacttgcattccaagccgctttgcagtggatgaggttgaatctccaactaacaacttgagccacagcattggaaacagtggagacatagtgaaccccgacatatttggatttagtggacatatgtga

SEQ ID NO: 176 - DNA, 2061 bp, Zea mays; identical to SEQ ID NO: 175

SEQ ID NO: 177 - DNA, 1428 bp, Zea mays
atgccgagaagcggcggcggcggcaatggcggtggcattagtagtagtagtagggtgatgcccaacctcccggccgggttccgcttccaccccacggacgaggagctcatggtgcactacctcatgaggcaggccgcctccatgccgtgccccgtccccatcatcgccgaggtcaacatctaccagtgcaacccctgggatctccctgccaaggcattgttcggcgacaaggagtggtttttcttcagcccccgggaccgcaagtaccccaacggcgcccgccccaaccgcgccgccgggtccgggtactggaaggccaccggcaccgacaaggccatcctgtcgtcgtccacgcccacgagccacggcggcgccaacatcgtcgtcggcgtcaagaaggcgctcgtcttctacggcggcaggccgcccaagggcaccaagacggactggatcatgcacgagtaccgcctctcgggcgcggcggacgacgactgcaagggcagcaccaggcgcagagtgtcttcctcctcgtcgtcctccatgaggctggacgactgggtgctgtgcaggatccacaagaagagcaacgatttccagttgtcgtcgtcgtcggagcatgagcacgagcaggaggagccggcggcgggcggctcagcgacgactgtggaggaactagacgctctcgtcgtcgtcgacaacagcagcagcagcgacaccaccaccaccaccatcaccaccaacgacaacaactctactgaaacagctgcgactcatcacgatcctcagacgatgatgatgctgagcaagtcgtgctcgctcaccgacctcctcgacagcatcgactacgcggcgctctcctcgcagatgctcctcctcgacgcgccccacccccacgctgatgacccgccgccacacatggtctactacccaccggcggcgtcggcgacgcaccagcaagcaataatagctaataacaccaacagtaatgacgactactatgacgacgacaacttgttgccgactgctgctgctactgcggtagacgcggcggcggcggcggtgctactcagctcgtcgcctgcagacaccaacggtgtgaacaagaggaagcgagtgacggccgtggactactacggcgccgctgaaccgccgaccttcttccaccaccacctcgatgatggcggcaacagcttcttcagtacgaccaagaagctcaagccgccgccgccaagtgattcgaggcatggcggccatttcggcaccgccacagcgagcagctaccgcgacagccagcagctcgtggacagcgcgagcagcagcggcgtcttcttccatcagtatgggtacggctacagcagcagcaacccgttcttgaacttgaaccagcagcagcagctgctactcaacagccacatcgggatgcagtag

SEQ ID NO: 178 - DNA, 1530 bp, Zea mays
atgggggccttcgcgaaggaggagcaccagttcctagccgagctcggcctcgcgcagcgcaacccaggcgcgttcgcatgcggtgcgtggggcggctcaggtcccaccgtcacctccacgagcccgaccaacaatcaggtcatcgcagaggtcgtggaggcgtccgtgcacgactacgaggagggcatgcgcgcctgcttcgatgccgccaagacatggatggcgattcctgctccaaagcgaggagagatcgttaggcaaatcggtgatgcactgagagcaaagctccatcaccttggcaggcttgtgtcacttgagatggggaaaattcttcctgaagggatcggtgaggttcaggaaatcatcgacatgtgtgattatgctgtggggctaagtcgccaactaaatggatccattataccatctgaacgaccaaaccatatgatgatggaggtgtggaatccccttggagttgtgggtgttataacggcatttaatttcccttgtgctgtgcttggttggaatgcttgcattgctttggtctgtggaaattgtgtcgtctggaaaggtgctccaacaactccactgatcactattgcaatgacaaaaatagtggctagtgtattggagaagaacaacttgccaggcgcaatttttacatctttttgtgggggcactgaaattggtcaagcaattgcccttgacattaggatacctttggtttcattcactggaagtacaagggctggtctaatggttcagcaacaagttagtgcaagatttggtaaatgccttcttgaacttagcggaaacaatgccatcattgttatggatgatgcagatatccagctagctgtgcgatctgtcttgttcgctgctgttggtacagcaggacaacgctgcactacatgtcgtaggctgattcttcatgagaacatatatcaaaccttccttgatcagcttgttgaggtatacaaacaagtccgaattggggatccgttggagaaaggcaccttactgggaccactgcacactcctgcttcaaaagagaactttttgaaaggcattcagactatcaaatctcagggagggaaaatcctttttggaggatctgccattgaatcagaaggaaactttgtgcaaccaacaattgtggaaattacaccttctgcaccagttgtgaaagaagaactctttggtcctgtcctttatgttatgaaatttcagtccttgaaggaagcaattgaaatcaataactctgttcctcaaggattgagcagttctatatttacaaagaggccagatattatttttaagtggctcgggccccatggtagtgattgtggtatagtgaatgtgaacatacctactaatggtgctgaaattggtggagcatttggtggagaaaaagcaactggtggtggacgagaagcagggagtgattcctggaagcagtacatgaggagggcgacttgtacaatcaactatgggagcgagctacctctagcccagggaatcaattttggttaa

SEQ ID NO: 179 - DNA, 393 bp, Zea mays
atgggagaggatctttctgggctgaatgttaaagaactgcagtccctagagaatcagttggagacaagcctgcgtggtgtccgcacaaagaaggaccatctcttgatagatgagatccacgaattgaatcgaaaggcaagtttatttcaccaagaaaacacagacttgtacaataagatcaacctgattcaccaagaaaatgctgaattacataaaaagatctatgagactgaaggaccaagtggagttaatcgggagccaccaactccattcaactttgcagtagtagaaaccagagatgttcctgtgcaacttggactcagcacactgccccaacagaacaacattgagccatcaactgctcctaagctaggattgcaattaagcccatga

SEQ ID NO: 180 - DNA, 2706 bp, Zea mays
atggcgtccagcgcagtagcaccaagatggttaaggggtaaggtgaaggctgtgacatctggggattgtcttgtaattatggggtgcacaaaggctgagatcgaacctgagaagtccatcaccttatcctaccttatggccccaaggctggctcgtcgtggtggagttgatgagccgtttgcatgggaaagcagagagtttctgaggaagctctgcatagggaaggaggtcacattcaaagtggattatacagctcctaatattggacgagaatttggaactgtttttctatgtgataagaatgttgcatactcagtagtttctgctggatgggcaaaggtaaaggagcaaggctccaagggtggcgaacaaaacccgcaccttggtgagttgttgaggttagaggaagttgccaagcaacagggtgttggtcgttggagcaaggaacctggtgctgctgaagagtcaataagatatcttccaccatctgcaattggtgaagcaagtggttttgatgcgaagggttttgcggttgaaaataaaggcaagagtttggaggccattgttgaacaagtacgcgatggcagtactgttcgtgtgtatttagtccctagttttcagtttgtccagatatatgttgctggagtacaggccccatcaatggggagacgcccatcggcacctactgtaattgctgaaactgatgatactgctaatgacacgaacggtgaagattctgagggaacacctgcccaactgactacagcacaaagacttgttgcatctgcagcttctgctgaaattccaccagataggtatggaagagaagccaagcacttcacagaggctagagttctcagcagagatgtgcgtatcgtggtggaaggcacagacagctttagtaatataattggttctgtgtattaccctgatggagagactgcaaaggacttggcccttgagcttgtcgaaaatgggcttgcaaaatatgttgagtggagtgctaatatgcttgatgttgaagtaaaaataaagctgaagaacgcagaactacaggctaaaaaggatcaattgagaatctggacagggttcaagccacctgtgacaaactcgaagcccattcatgaccagaaatttactggaaaagtggtagaggttgtaagtggggattgcattattgtggctgatgattctgctccatatggcagtccttcagccgaacgtcgggttaatctgtcaagcattagggcccctaagttgggcaatgctcgtacagatgtgaagcctgaccattttgctcgtgaagctaaggagttcttgcgcatgaggttgattggcaagcaagtggctgttgaaatggaatattctcgaaggatcagcaccgtggatggacagagtgttgctccaacagcaaacattgctgatacaagagtattagattatggttcagtttttctgggttcaccatcacagactgatggagatgacatatcttctgctccgagctctgccagccagcctggagttaatgttgctgaacttttactctcacgaggctttgctaaaacatctaaacacagggattatgaggaaaggtcgcactattatgatgctctattagcagctgaatcacgggctgagaaagcaaagaaaggagtgcattctcaaaaagaatctcctgtgatgcatataacagatttaacaactgtatctgcaaagaaggccaaagatttccttcccttcttgcagaggaacagaaggcattctgccgttgttgaatatgtttttagtggccatcggttcaaactaacaattcctaaggagacttgcagtattgccttctcattatctggtgttcggtgtcctggtaaaggcgagccatactcagatgaagctattgctttgatgaggagaaggatactacagcgtgatgtggagatagaggttgaagcagttgacagaacaggaacattcataggttcgttgtgggagtccaagaccaacatgggctctgtacttctggaagctgggctggcgaagctgagttcttttggcttggataggatgtcagatgctcatgtcctaacaagagctgaacagtttgcgaagcaacaaaagattaagatatgggagaactatgtcgagggtgagaatgcttcaaatggatccgcacctgaatcgaaacaaaaggaaatcctcaaggttgtcgccacggaagttcttggtggtgggaagttttatgttcagacagtgggtgaccagagggtggcttcaattcaacagcagcttgcatctttgaaacttaaagatgcaccagtcattggtgcctttaatcctgtgaagggagagatagtcctctcacaatttagccttgacaactcctggaacagagctatgattgttaatggacctcgctctgtagaatctctaaacgacaagtttgaagtattctatatcgactatggcaaccaagaggtggttccctacagtcgtctacgacccgtggacccatctgtttcctcttctcctgctcttgctcagttatgcagccttgctttcataaaagtgcccagtcttgaggatgactttggtcaggaagcagcagagtatctaagtgaatgtttgctcagtagctcaaagcaatatcgggcaatgatcgaagaacgtgatgcttctgggggaaaatcaaagggacaaggaacctga

SEQ ID NO: 181 - DNA, 318 bp, Zea mays
atggcaagccgatctagcgcgatggaaggaggggcggcaatacaaaggaggaatgccgtgaagcggcatctgcagcagcgtcagcaggaggcggatttcctcgacaagaaggtcatcgcgtccacctacttcagcatcggggcgttcctcgtgctcgcctgcctcaccgtctcgctgctgatactgccgctggtgctgcctcccctgccgccgccgccgtcgctgctgttgtggctgccggtctgcctgctcgtcttgctggttgtactggccttcatgccgacagatgtgcgcagcatggcctcctcttacctgtaa

SEQ ID NO: 182 - DNA, 1881 bp, Zea mays
atgtctccgttccagggatacagaggcgatgcggttctctccggcgtccggtcgcggaagcgcgtgttcgcgacggcggccgcggagcccgtgacggcggcgcccaagaggcagaagcgcggggatgagatgcccctggacgcgctgccggacgagtgcctcttcgaggtcctgcgccgcgtgcagggcacccgcgcgcgctgcgcgtcggcctgcgtctcccgccgctggctcgcgctcctcgccggcatccgcgcctctgaggccgtgctggccccggccgcccccgccgtgccggacctcaaccaggagtacctcagcgaggacgacgaggccgatctgatggacctggacggcgacgcccgcgagaggaccctcgagggcatggaggccacggacgcgcgcctcacggcggcggccgtcgccggccgtctggctgccgtctccgtccgcgggagccaccccgcgcgtggcgtcaccgacgccggcatctccgccctcgcccgcggctgcccagagctccgctcccttaccctgtgggatgtcccgcaggtgacggacgccgggctcgccgaggtcgcggccgagtgccactcgctggagcggcttgacatctctggctgccctatgatcacggacaagggcctcgccgcggttgctcagggttgcccggaactgaagtcgctcaccatcgagggatgctccggtgtggccaacgagggtctcaaggctgtaggtcgtttctgcgccaagctacaggcggttagcatcaagaattgcgcactcgtcgatgaccagggtgtgtctggcctcgtctgctctgcgaccgcctcttcgttgacaaaggtccggcttcagggtttgaacattactgatgcttcccttgctgtgatcgggtactacgggaagtcaatcaaagacctgaccctttctcgcctccctgctgtcggtgagaggggattctgggtgatggccaatgccctgggcctgcagaagctcaggcgaatgactgttgtctcctgcccgggactcacggatcttgctcttgcatctgtcgccaagttcagcccaagtttgaggcttgttaacctcaagaggtgcagcaaggtctcagatggatgtctcaaggaatttgcagaatcatctaaggtcctggagaacttgcagatcgaggaatgcagcagggttactcttacgggcattcttgcgttcctcctcaactgcagcccaaagtttaagtctctctccctgtccaagtgcgtcgggatcaaggacatctgctccgcacctgcacaacttccggtatgcaaatcactacgttccctggccatcaaggattgcccaggcttcaccgacgccagccttgccgtggtgggcatgatctgccctcagctggagaacgtcaatttgagtggccttagtgcagtcaccgacagcggcttccttccactgataaagagttcaaacagtgggctggtcaacgtcgatttgaacggttgcgagaatctcacggatgcagctgtttccgccttggttaaggcccacggcgcttcccttgcgcacctcagtctcgagggatgcagcaagattaccgatgcaagcctgttcgccatctctgagagctgcagccagctcgccgagctcgacctttcgaactgcatggtcagcgactacggcgtcgcggtcttggcagcggcaaagcagctcaggctgcgcgtcctctcgctgtccggctgtatgaaggtcacccagaagagcgtccctttcctaggcagcatgtcttcgtccttggaggggctgaatctccagttcaacttcattggcaaccacaacatcgcgtccctggagaagcagctctggcggtgcgacatccttgcttag

SEQ ID NO: 183 - DNA, 1881 bp, Zea mays; identical to SEQ ID NO: 182

SEQ ID NO: 184 - DNA, 1710 bp, Zea mays
atgtccgagcgcatcgacctcaacaacacgtcccaaaccctggcgccacccaagcgcggccgcggccgcccccgcaagaaccccccgcctcccgctcacccgcgccctccggatcccgacacccccatggtcagcggcttcgctccgggcgacatggtctggggaaagaagctcaaccacgccgcctggccgggcctcatctactccgccggagggaacagcaccggccacgaggcccagctcctcgtctcctacttcggcgacaaggccttcgcctggtgcgacgcagccgagctcaggccctacgagccctacttccccgtcgccgagctctacgacgacggcggcgaggactttgacgccgccgtcgaggcctctctcgacgagttctcccgccgcgtcgaggccgccctcgcctccgccgcccgccccttcgcctccgccgatttcctcgcctcgctccacgatctcgccgcggatcgcatgggcttcaccaacagggtgcaagccgccgtcgccaaggcgcatctcagagccttcgacgccttcagggctctgccggacccacctcagtacaccttggagctcggtctactcccacacgtcccgctcccgctgcccgatcctaaagctgacacggatgccgccgccgccttcaccacccccgcatccagttccaggaggggcaggaagaggaaggaggaactcgtcaaggacgacgactccgatgaggactgggaccccagcaagaggggtgccaccgacttggattccgatgtggacttcgaccacaggagggggtccaggggcaggggcagggggagggggggcagcagcggtggcagcggcaggcctcgaggaaggcccaggaaaacagatgcctgcagggacgcaccacagctcaaggacgaagatggcattcaagagtatccatcggctgatgagatgttgctgcagcttctgtccatcgccactgatcctgtaaatggcaattatgactctgctcctgtgatcgttagcttcttctcaaagcacaaggactccaaggcgcctagtgtatatgaagataaagagctgcttgagaattttggttgcaagaagggtaggaaaaagcccgtcagaagcttgggcctagctccaaagccagaagccagtgatgataaggatcagttcatgactgtggatggccagaggggccgtaggaagtctgctgggagcttgtactcagctagaaaggccgaagattcatattggtgtgatattatcatcagcgatttcgacgacggtgatagtgactatgaaggttgcaagaggaagcggccctctcagaacactaacaggagcgctaataagaagatgaagcaagaggaaccacctcaaggagccccatcagatatggaaaatggggctcctgcagatccttcgtcgaatgaaaaacctgcagatggcccagccgctcttattctacattttagcagtccagaagctattccttctgttgatgacatcaatagcatattccgtattcatggaccgatcgtggagcgtgagactgtgatcactaagaagtcaaagattgcaaaagtagttttctctaagagcgctgatgcagagagcgcatatcacagttcggggaagcataacgcatttggtccatcgcttctcacatctgaaattaaatacttgccatcggagcctcaggcttcttaa

SEQ ID NO: 185 - DNA, 1365 bp, Zea mays
atggagctagtagcgtggctcgtcatcgtgttctcagtctccctcgctgggctcctgccagtggtctcggcgtcgacgacgacaccgcagcagcaatgtggcggcaataatgtcggacctgccggagtgagagcaggctactggtcgccgtcctcgaaccgctactccgcggtcggcagcatcgacgcgtccctgtacacgcacctctactacagcgcggtgaccatcgacgagacgagctacgcggtcgctccgcctccgccgacggccgaagacgcctcgctgctcgccgctttctctggcgcggtcaagtccgcgagcccgtccaccaggaccgtgctgtccgtgggcacggacgagtacagggtgggcgagtcgaacgccgccttctccaggatggcgtcggacgcgggcctccgggcggtattcatcaactcctccctgaacctggcccgcgccaacggcttcgacggcctggacctgtcgtggatcttcccggccacgcaggcggacatgcagaacctcggcgccctgctcgcggagtggcgggcgaggatcacggaggaatccgtcgccaagtctttgcctcctcaacctcaaccccttctcctcaccgcgacgctctacttctccaaccacctgttcggcacgcccgacggcaacctcgactaccccgtggacgccatcgcgagcagcctcgactgggccaacgtcctcaccttcggcttccgcggggacagcggcgtcaccgcggccgacgcgccgctctacgacacgtcctcgcacttctcggccagctacggcgtggtctcgtggctggacgcggggctccctccgtgcaggctggtgatggggatacctctgttcgggaggtcgtggttcctcaggaacaaggccaagaacgggctaggcgcgccggccgccgccgccgggacgaagcagaggaggagcaaccagactgggataatcgcgtacgcggagaccgaagagtacctgagctctcaaggcaccgtcgtcacctacgacgaccagtcggtggcggagtatttctgcagcggtgacctctgggtcagtttcgacggcgcgcaggtcgtgcagcggaagctggagttcgcggcgaggtctcagttgctcggctacttcctctggaccgtcggcttcgacgattcgaacagcacaatctccaggaaagcatcggagtcatggcaccagtatgctcagggtggttttggaatcatgcacgcaggaggttcaaaccaatacgttgcatttaactcgtcttcagtatcacttggtagctgctattcgagatctctcagctgtttgctgtcttcagtacttctgttggttattctgtttcgttaa

SEQ ID NO: 186 - DNA, 1365 bp, Zea mays; identical to SEQ ID NO: 185

SEQ ID NO: 187 - DNA, 2121 bp, Zea mays
atggccactgtgaacaactggctcgctttctccctctccccgcaggagctgccgccctcccagacgacggactccacgctcatctcggccgccaccgccgaccatgtctccggcgatgtctgcttcaacatcccccaagattggagcatgaggggatcagagctttcggcgctcgtcgcggagccgaagctggaggacttcctcggcggcatctccttctccgagcagcatcacaagtccaactgcaacttgatacccagcactagcagcacagtttgctacgcgagctcagctgctagcaccggctaccatcaccagctgtaccagcccaccagctccgcgctccacttcgcggactccgtcatggtggcctcctcggccggtgtccacgacggcggttccatgctcagcgcggccgccgctaacggtgtcgctggcgctgccagtgccaacggcggcggcatcgggctgtccatgatcaagaactggctgcggagccaaccggcgcccatgcagccgagggcggcggcggctgagggcgcgcaggggctctctttgtccatgaacatggcggggacgacccaaggcgctgctggcatgccacttctcgctggagagcgcgcacgggcgcccgagagtgtatcgacgtcagcacagggtggtgccgtcgtcgtcacggcgccgaaggaggatagcggtggcagcggtgttgccggtgctctagtagccgtgagcacggacacgggtggcagcggcggcgcgtcggctgacaacacggcaaggaagacggtggacacgttcgggcagcgcacgtcgatttaccgtggcgtgacaaggcatagatggactgggagatatgaggcacatctttgggataacagttgcagaagggaaggacaaactcgtaagggtcgtcaaggtggctatgataaagaggagaaagctgctagggcttatgatcttgctgctctgaagtactggggtgccacaacaacaacaaattttccagtgagtaactacgaaaaggagctcgaggacatgaagcacatgacaaggcaggagtttgtagcgtctctgagaaggaagagcagtggtttctccagaggtgcatccatttacaggggagtgactaggcatcaccaacatggaagatggcaagcacggattggacgagttgcagggaacaaggatctttacttgggcaccttcagcacccaggaggaggcagcggaggcgtacgacatcgcggcgatcaagttccgcggcctcaacgccgtcaccaacttcgacatgagccgctacgacgtgaagagcatcctggacagcagcgccctccccatcggcagcgccgccaagcgtctcaaggaggccgaggccgcagcgtccgcgcagcaccaccacgccggcgtggtgagctacgacgtcggccgcatcgcctcgcagctcggcgacggcggagccctagcggcggcgtacggcgcgcactaccacggcgccgcctggccgaccatcgcgttccagccgggcgccgccaccacaggcctgtaccacccgtacgcgcagcagccaatgcgcggcggcgggtggtgcaagcaggagcaggaccacgcggtgatcgcggccgcgcacagcctgcaggacctccaccacttgaacctgggcgcggccggcgcgcacgactttttctcggcagggcagcaggccgccgccgcagctgcgatgcacggcctggctagcatcgacagtgcgtcgctcgagcacagcaccggctccaactccgtcgtctacaacggcggggtcggcgatagcaacggcgccagcgccgttggcagcggcggtggctacatgatgccgatgagcgctgccggagcaaccactacatcggcaatggtgagccacgagcagatgcatgcacgggcctacgacgaagccaagcaggctgctcagatggggtacgagagctacctggtgaacgcggagaacaatggtggcggaaggatgtctgcatgggggaccgtcgtctctgcagccgcggcggcagcagcaagcagcaacgacaacattgccgccgacgtcggccatggcggcgcgcagctcttcagtgtctggaacgacacttaa

SEQ ID NO: 188 - DNA, 792 bp, Zea mays
atgaccacttccggcgcgcccaagcgcccaagcttcaagcgctcctcgcccgggaagaagtcgcggctcagaacccgtcgcgtcgccgccggtggccgagagggcgaggccgaggccgaggcggcggggacctcggcgctggcgagggcattgcttcccgcatcggtggggctagacgcggtgccgcctgttgggcgcgcattgccgcgagacttcttcgaggtggatgccctcgacctggccccccgcctcctcggcaagctccttcggcgcgatgaggttgtcctccgcatcaccgaggtggaggcttataggccaaatgactccgcatgccatggccggttcggcatcacagcgaggacagctccagtgtttggaccgggaggccatgcatatgtgtatctgtgctatggacttcacatgatgctcaatgtggttgccgatatagagggggttggtgctgccgttttgatccggtcatgttctccagttagcggtcttgaaactattcagcggcgccggggtcaacaaaccgagaaaccgatcctacttacgggaccaggaaaggttggacaagctctgggcctatccactgactggtcgaaccatcctctctacgcgcctggtgggttggaggtactggacgggccagagccggagagcattttggttggtccccgcgttggcatcgagtacgcgtctcccgagcatgtcgcggcgccgtggaggttcgcgattgccggcacgccgtggatcagcgcccccaaaaacacgctacggccacgctactga

SEQ ID NO: 189 - DNA, 1314 bp, Zea mays
atggcggcgacaatggcagtgacgacgatggtgacgaggagcaaggagagctggtcgtcattgcaggtcccggcggtggcattcccttggaagccacgaggtggcaagaccggcggcctcgagttccctcgccgggcgatgttcgccagcgtcggcctcaacgtgtgcccgggcgtcccagcggggcgcgacccgcgggagcccgatcccaaggtcgtccgggcggccgacaactgcgacatcgcgcgccagcttggcgccgccgttcccgggcagcaggccgcctgggaggcggaggaagaggcagcgaagaggaggaagcagaagggcggcggcagcaagaagcagcagcagctgggcgatctgagcctgaggaaggtcagggtcaagatcgccaacccgcacctgcggcgcctggttagcggcgccatcgccggcgccgtgtccaggacgtttgtggcgccgctggagacgatccggacgcacttgatggtcggcagcatcggcgtcgactccatggccggggtgttccagtggatcatgcagaacgaagggtggaccggcctgttccgcggcaacgccgtcaacgtcctgcgcgtcgctccgagcaaggctatcgagcatttcacctatgacacggccaagaagttcctaacccccaagggcgacgagccgcccaagatcccgatccccactccgctggttgccggagctctagccggattcgcctcaaccttgtgcacctaccccatggagctgatcaagaccagggtcaccatcgagaaggacgtatacgacaacgtcgcgcacgcgttcgtgaagatcctacgcgacgagggcccgtcggagctgtaccgtgggctgacacccagcctgatcggcgtggtgccgtacgcggcctgtaacttctacgcctacgagacgctgaagcggctctaccgtcgcgcgaccgggcggcgtcccggcgcggacgtgggccccgtggcgacgctgctcatcgggtccgcggcgggcgccatcgccagctcggccacgttcccgctagaggtggcccgcaagcagatgcaggtgggcgctgtgggcgggaggcaggtgtaccagaacgtcctccacgctatctactgcatcctcaagaaggagggcgccggcggcctgtaccgaggtctcggccctagctgcatcaagctcatgcccgccgccggcatcgccttcatgtgctacgaggcgtgcaagaagatcctcgtcgacaaggaggatgaggaggaggaggacgaagccggcggcggagaggatgacaagaaaaaggttgaatga

SEQ ID NO: 190 - DNA, 783 bp, Zea mays
atggattcggaggcggtgcagcacggctgcgcgcattacagccgtgggtgcagcgtcgtggcgccctgctgcggccaggccttcggctgccgccattgccacaacgacgccaagaactcgctggaggtcgacccgcgcgaccggcacgagatcccccgccacgaaataaagaaggtgatctgttctctctgctccaaggaacaggacgtgcaacagaactgctccagctgtggggcctgcatgggcaagtacttctgtaaagtatgcaagttcttcgatgatgatgtctcaaagggccagtaccactgtgacggatgtggaatatgtagaaccggcggcgtggagaactttttccactgtgataaatgtgggtgttgctacagcaatgtcttgaaggattcccaccactgcgtcgaaagagcaatgcatcacaactgccccgtctgctttgagtatctgttcgactccacgaaggacatcagcgtgctgcaatgtgggcataccatccatttggagtgcatgaacgagatgagagcacaccatcacttctcatgcccagtgtgctcgaggtccgcctgcgacatgtcggccacatggcggaagctcgacgaggaggtcgcggccacgccgatgcctgacatctaccagaagcacatggtgtggatcctgtgcaacgactgcagcgcgacctcgagcgtgcggttccacgtgctggggcacaagtgccccgcgtgcagctcgtacaacacccgggagacgagggctgcgtgccccaggatctga

SEQ ID NO: 191 - DNA, 864 bp, Zea mays
atgctgttctcccgttccccggctgccacaaatcagccactcgtcccttcccgccggacgctgctcctatcgccatgcccgcgagccggcgcgaccccggcaccggtggccgacgctgcgctcctaccgggcgggctgcgtgcggagtcgctgccgcggcacgtggctgtggtgatggacgggaactcgcggtgggcgcgcgcgcgcgggctgccgtccgcagccgggcacgaggccgggcgccgcgcgctggaggaggtggtgcggctctcccgcgcctggggcgtccgcacgctcaccgccttcgccttctcccacgagaactggagccggcccaaggtggaggtggaattcttgatggggcagtttgagcgagcgatccgcgaaagcgtagctgaatttttgagagaaggaattcggctacgcgtaatcggcgactcctcaaggctgccggtttctcttcagaggaccgcgagagaagccgaggaggccacgcggaacaactcgcagctcgacctgacactggcaatcagctacagcgggcggagggacatagtgcaggcgtgccggaccctagcccagaaggtgcgcgacaagctgctcgagccggaggacatcgacgagtcgctgttcgccggtgagctcgagacgagccacgccaacggcaacgagctcccttatcccgacctggtcatcagaaccagcggcgaactgcggctgagcaacttcctgctgtggcagtcggcgtacgcggagctcttcttcacggacacgctgtggcccgacttcggagaggccgattacctccaagcgctggtctcgttccagagcagagacaggcggttcggcgtaaggaaattgtag

SEQ ID NO: 192 - DNA, 756 bp, Zea mays
atggggcgggggccggtgcagctgcgccggatcgagaacaagatcaaccgccaggtgaccttctccaagcgccggaacgggctgctgaagaaggcccacgagatctccgtgctctgcgacgcagaggtcgcgctcatcgtcttctccactaaggggaagctctacgagtactctagccattccagcatggaaggcattcttgagcgttaccagcgttactcatttgaagaaagggcagtacttaacccaagtattgaagaccaggcaaattggggagatgaatatgtccggttaaaatccaaacttgatgcacttcagaagagtcaaaggcagctgttaggagaacaattgagttcactgaccataaaagaactccagcaactggagcaacaactggacagttctttgaagcatattaggtcaagaaagaatcagctcatgttcgattcaatttccgcgcttcagaaaaaggagaaagcacttacagatcaaaacggtgtcctgcaaaagttcatggaggcagagaaggagaaaaacaaggctttgatgaacgcgcagctccgggagcagcaaaatggagcatcaacaagctccccatcactttcaccaccaatagttccagattccatgccaactctaaatatagggccatgtcaacatagaggggcagcagaatctgagtctgaaccgtctcctgctcctgcacaagcaaacaggggcaacctgccaccatggatgctccgcactgtcaagtaa

SEQ ID NO: 193 - DNA, 1683 bp, Zea mays
atgggggaaggtgcaggtgaccgtgtcctgagccgcctccacagcgtcagggagcgcattggcgactcactctctgcccaccccaatgagcttgtcgccgtcttcaccaggctgaaaaaccttggaaagggtatgctgcagccccaccagatcattgccgagtacaacaatgcgatccctgaggctgagcgcgagaagctcaaggatggtgcttttgaggatgtcctgagggcagctcaggaggcgattgtcatccccccatgggttgcacttgccatccgccctaggcctggtgtctgggagtatgtgagggtcaacgtcagtgagctcgctgttgaggagctgagagttcctgagtacctgcagttcaaggaacagcttgtggaagaaggccccaacaacaactttgttcttgagctggactttgagccattcaatgcctccttcccccgtccttctctgtcaaagtccattggcaatggcgtgcagttcctcaacaggcacctgtcatcaaagctcttccatgacaaggagagcatgtaccccttgctcaacttccttcgcgcccacaactacaaggggatgaccatgatgttgaacgacagaatccgcagtctcagtgctctgcaaggtgcgctgaggaaggctgaggagcacctgtccaccctacaagctgataccccatactctgaatttcaccacaggttccaggaacttggtctggagaagggttggggtgattgcgctaagcgtgcacaggagactatccacctcctcttggacctcctggaggccccagatccgtccaccctggagaagttccttggaacgatccccatggtgttcaatgtcgttatcctctcccctcatggttacttcgctcaagctaatgtcttgggttaccctgacaccggaggccaggttgtctacatcttggatcaagtgcgcgctatggagaacgaaatgctgctgaggatcaagcagtgtggtcttgacatcacgccgaagatccttattgtcaccaggttgctccctgatgcaactggcaccacctgtggccagcgccttgagaaggtccttggcaccgagcactgccatatccttcgcgtgccattcagaacagaaaacggaatcgttcgcaagtggatctcgcgatttgaagtctggccgtacctggagacttacactgatgacgtggcgcatgagattgctggagagcttcaggccaatcctgacctgatcatcggaaactacagtgacggaaaccttgttgcgtgtttgctcgcccacaagatgggtgttactcactgtaccattgcccatgcgcttgagaaaactaagtaccctaactccgacctctactggaagaagtttgaggatcactaccacttctcgtgccagttcaccactgacttgattgcaatgaaccatgccgacttcatcatcaccagtaccttccaagagatcgccggaaacaaggacaccgtcggccagtacgagtcacacatggcgttcacaatgcctggcctgtaccgcgttgtccacggcattgatgtgttcgaccccaagttcaacatcgtgtctcctggcgcggacctgtccatctacttcccgtacaccgagtcgcacaagaggctgacctcccttcacccggaggcgaaaaaaagagtctgcttttgctag

SEQ ID NO: 194 - DNA, 774 bp, Zea mays
atggacggaggagccggctttccgggcacgcagccggtctcccgctcgccggaggacgtcttccgggactaccgcgcgcgccaggccggcctgatcagggcgctcaccaccgatgtggagaagttctacgtgatgtgcgacccagagaaggagaacttatgtttatatggacttcctaatgagacatgggaaataaacttgcctgctgaagaggtccctcctgaactgccagagccagctcttggaattaattttgctcgtgatgggatggatgaaaaagattggctatcacttgttgcagtgcatagtgattcttggctaatgtctgttgcattttattttggagcaaggtttggattcgataaagaatccaggaaacgtctcttcaccatgatcaataaccttcccagcatatatgaggttgtcacaggaacagccaagaaagagcccaaagaaaaaactcctaaaagcaacattaagactaacaaatctggctcaaagccctcgcgccatgcggaacccaactcaagggtcccaaagatgccacctccaaaggacgaggagagtgaagaggaggaaggggaaccacaggaagaccaggagagtgcgctgtgtggcgcatgtggcctaggttatgacgacttctggatctgctgcgacctatgcgagacatggttccacggcaagtgtgttaagatcaccccagctaaagcggaccacatcaagcagtataagtgcccctcctgcacgggaagcaagagggccaaggtttga

SEQ ID NO: 195 - DNA, 429 bp, Zea mays
atgggcaagctgtggacgatcctcactcacctccactccctagcagggccaacggtgatgctgctgtaccctctgtacgcgtccgtgcgggcgatggagagcccgtccaagctggacgacgagcagtggctcgcctactggatcctctactccttcgtcacgctcatggagatgctcctcgagtccctcatatactggatccccatctggtacgagctcaagctgctgttcatcgcgtggctcgtgctccccaacttcaggggcgccgccttcatctacgacaagttcgtgcgcgagcagctccggaagcacggcctcaccgccgccggctccgtcaagtcgtcgtcgccgtcgtccaaggacaaggacaagcccaagaacaagttcctcgccttcgtcacgcccaagaaggatcatgaagcttactga

SEQ ID NO: 196 - DNA, 2631 bp, Zea mays
atgtcggacctcgcttccagctgcaaggataaacttgcgtattttagaataaaggagctcaaagatatcttaaatcagctggggttaccgaagcaaggaaagaagcaggaccttgttgacagggtattggctattttatcagatgagcaaggtcaacatcatcatggatggggaaggaaaaatgctcttacaagggaggcggtggcaaaagttgttgatgacacatacaggaaaatgcaagtatgtgctcctgaccttccctctagaagccacagtggatcagatttcagtcatttcaggcccaaagaggaagcgcctgacttctaccatgtggatactaaggtccgctgcctttgcaatagcacattgctaaatgacaatatgattaagtgcgaagatggcaaatgccaggtgtggcagcatattacctgcgtactcattccagataagcccacggagggtgctggccctgatattccacctcatttttattgtgaactgtgccgactgaaacgggcagacccgttttgggtgactaccggaaatccattactacctgtgaaatttatgtcatctggtgttggaaatgatggagcaagtgtacctcaaattgtggagaagactttccaactttcccgagcagatagagaaacagttcagagacaagaatatgatctccaggtttggtgcatccttataaatgacaaagtccagttcaggatgcaatggcctcaatatgcagaattgcaagtgaacggtattcctgtacgagtaatgaccaggcccggttctcagttactagggataaatgggcgggatgatgggccactggtaaccacatgcagtagagaagggatcaacaaaattagcttatctagagtggatgctcgaaccttttgctttggagttcgaattgttaggaggaggactgttcctcaggtattaaatttgatcccaaaggaaggtgaaggggagtcttttgaggatgctcttgctcgtgttcgtcgctgtcttggaggtggaggtgctacggacaatgctgatagtgatagcgacctggaagtggttactgaatctgttacagtcaaccttcgttgccctaatagcggatccagaatgaggattgctggaaggttcaagccttgtgttcacatgggctgttttgatcttgaaacttttgtggaattgaatcaacgctcacgcaagtggcaatgcccaatatgtttaaagaattactctctcgagaacttgatgatcgatccttatttcaaccggattacatctttgttgcacaattgcagtgaagatgttaatgagcttgatgttaaacctgatgggtcatggcgtgtgaagggtgatgccgctaccagagatctatctcagtggcatatgcctgatggtactctttgtgactcaaaggaagatacaaaccctggtgtcgttagtgttaatgagttcaagagagagggtacttctgatggacatagaactttgaaacttggaattaaaaaaacccctaatggattatggcaggttagcagtaaaccagatgataagaaacccgtggttagaaatcacatccaaaacaacacggggtactcaataccaaacatagtacctatgatcagtagccccactgggagttgcagagatggtgaagatgtaagtgtgaaccaagaagggggtggtattcagtttgatatatcattgaaccaagagtttgacagttttgcgcataactttggtcaaacatacaatacagaggataggcaacaagagccacaacataatgctgcagatgtcattgttcttagtgattctgatgaagaaaatgacccgattgttcgcctgccagctgtctatgcaaatactcctacaaatggtgacagtttccctttcgtcactgatgctgctgtatctggatatcctgaagggtaccaggaggatgctggggttggtacaagtggccttggtttattgagcaacaatactggtgattttgaaataaataactggcaaatgcattcttatccacaaccagagcaagggttccagttttttgggactgatactgatgttggcaatccttttgttggtccgcataattcctttagtattacaccagaagactactcccttgactgtaatgttggcatagaggatccatctgcagctcacgatgtctcaatttgccgaaacagtaatgatgtgcatggaagcttggttgataacccattggctttagcaggtgacgatccatctttgcaaattttccttccaagtcaaccttctactgttccccttcaggaagaactgagtgagcgcgctaatactccaaatggagtccaccctgatgattggaggatatctcttacgcttgcggctggtggagggggtaatgaagaacctacaagtgttgatggcctaaaatcacagccaaaagttccatcaaaagaggcaggagttgaacctttacttgatgctgcttctgctctcccaagcatgaacaatgacagatgtaatggatctaatctaaacccgagaaggattgaaaatatattttctcatcctcgccaaccacggtctgttaggcctcgtttgtgtttgtcattagattctgattcagagtag

SEQ ID NO: 197 - DNA, 1260 bp, Zea mays
atgaaggtggaggccagggttggcgacatctaccgctccctcttcggggccgcgcccaacacgaaatccatcatgctagagctgtggcgtgatcagcatatcgagtatctgacgcctgggctgaggcatatgggaccagcctttcatgttctagatgccaatcgcccttggctatgctactggatggttcatccacttgctttgctggatgaagcacttgatgatgatcttgagaatgatatcatagacttcttagctcgatgtcaggataaagatggtggatatagtggtggacctggacagttgcctcacctagctacgacttatgctgctgtaaatacacttgtgacaatagggagcgaaagagcattgtcatcaatcaataggggcaacctgtacaattttatgctgcagatgaaagatgtatcaggtgctttcagaatgcatgatggtggcgaaattgatgtccgtgcttcctacaccgctatatcggttgccagccttgtgaatattcttgattttaaactggcaaaaggtgtaggcgactacatagcaagatgtcaaacttatgaaggtggtattgctggggagccttatgctgaagcacatggtgggtatacattctgtggattggctgctttgatcctgcttaatgaggcagagaaagttgacttgcctagtttgattggctgggtggcttttcgtcaaggagtggaatgcggatttcaaggacgaactaataaattggttgatggttgctactccttttggcagggagctgccattgctttcacacaaaagttaattacgattgttgataagcaattgaagtcctcgtattcctgcaaaaggccatcaggagaggatgcctgcagcaccagttcatatgggtgcaccgcgaaaaagtcttcctctgctgtggactatgcgaagtttggatttgattttatacaacagagcaaccaaattggcccactcttccataacattgccctgcaacaatacatcctactttgttctcaggtactagagggaggcttgagggataagcctggaaagaacagagatcactatcattcatgctactgcctcagtggcctcgcagttagccagtacagtgccatgactgatactggttcgtgcccattacctcagcatgtgcttggaccgtactctaatttgctggagccaatccatccactctacaatgttgtcctagataagtaccatacagcctatgagttcttctcagaagagtga

SEQ ID NO: 198 - DNA, 1260 bp, Zea mays; identical to SEQ ID NO: 197

SEQ ID NO: 199 - DNA, 1260 bp, Zea mays; identical to SEQ ID NO: 197

SEQ ID NO: 200 - DNA, 705 bp, Zea mays
atgtctgaggtgtcggtgataaaccaggcggaggtggaggatgcgggtgccgggcagctggacctgccgccggggttccgcttccaccccaccgacgaggagatcatctcgcactacctcgcccataaggccctcaaccaccgcttcgtctccggtgtcatcggcgaggtcgacctcaacaagtgcgagccatgggacctgccaggcagggccaagatgggggagaaggagtggtacttcttctgccacaaggatcgcaagtacccgacgggcacgcggaccaaccgcgccacggagaccggctactggaaggccaccggcaaggacaaggagatcttcaggggccgcggcgtcctcgtgggcatgaagaagacgctcgtcttctaccgcggccgcgcgccgcgcggggagaagaccggctgggtcatgcacgagttccgcctcgagggcaagcttcccgagcggctcccgcgctccgccaaggtccggccctccccccctgttctcgcctcgtttaattgctcgttcggccctggaaatctttttctccccccccccccccccccccccccctttttcgtccgccggtggcctaaatcctcttcttttcttgctgccttcgtttgtttgtttgttgcgtgcaggacgagtgggccgtgtgcaaggtgttcaacaaggagctggcggcgaggaccgagccaataa

SEQ ID NO: 201 - DNA, 1497 bp, Zea mays
atgaagagctgcggcgggggaggagcggacgggcagcagtgcccgtgcgactactgcggggaggcggcggcggctctgcactgccgcgcggacgccgcgcgcctctgcgtcgcgtgcgaccgccacgtgcacgccgccaacgcgctttcgcggaagcacgtgcgggcgccgctctgcgcagggtgcgccgcgcgcccggccgccgcgcgcgtctccctcggcgccgacccggcgttcctctgcgcggactgctgcgagggctgcgccgccgcttccgcggcgcgcgtgtcggttgagggcttctcggggtgcccctcggcggccgagctcgccgcgtcatgggggctcgacctccgccgcgcggccgtggccgtgggcgacgacggcgacggcggcgacgacgacgaccccttcctctcggtgctcgactactccgtgctgggggtgggggtggccgacacggacctgcgcgacctctacgtgccgtgcgacccaccgcgggtgcccgtccccgacgccggcgcgcgcccgctcaggggcgaggcgctgtgcgaccagctcgcggagatggcgcggcgcgacgaggcggacacgtcccacgcgcacccgcactcggatctgagcccgcgcacgcctcgccgcacctccgcggcttccagcggacgcctgccgtcgggcaagatggcgccccccgcggcgctgccggtgccggctcatcctcctcccgccgcgccgcaggaggtgcctctgccgtacacgtccctgctcatgatggcgtccgccaactgcagcgacctcattggcggcggcgaccgggtgggtgataccgacgaacaactgctctgggactgcgctgcgccctcggtgccgcccacccagatatgggacttcaatttaggacggtcaaggcatcacgatgagaaatctgctcttgaagttggatacggttctaaccatggcggctttatgattaagagttacagtgacatgcttaaggacatttcttcggggacaacgaaagatctggaagatatttatgactcaagatactgctcaaccgccgaagatatcatgtcctctaatatctgtcagttgtcatcgaaaaatgtgagcaccgggagcaacaaacggaaggtgaggtcatgtgctgcgtcgacgatggatggaccaacgacctccgggaaccacaaccacgtacccgcttcagcttcaggtccaggagcagcgctcaccagggagatctccttcggggatcagacggtgtccgcccccgcggccgagaccgagaggcctgccgccgtgaggatcgacagcgagacgcttgcgcagaacagggacagcgccatgcagcggtacagggagaagaagaagaaccgcaggtacgagaagcacatccggtacgagtcgaggaagctgcgggcggacacgaggaagcgggtgaaagggcggttcgtcaagtcgaccgaagcactcaacgccgccagatacaacggatga

SEQ ID NO: 202 - DNA, 972 bp, Zea mays
atgtcggcggcgccagcggcgggagggcagggtggcgggggcattgacgccgcgctcctcgacgacatcatccgccgcctgctcgaggtgcggaccgcgcgcccagggaagcaggtgcagctctctgagtcggagatccgccagctgtgcaccgtctcccgcgccatcttcctcagccagcccaacctcctcgagctcgaggcgcccatcaagatctgcggtgacatccatggtcaatacagtgatcttctaaggctttttgaatatggaggttttcctcctgaagccaattatctattcttaggtgattatgttgatcgaggcaaacaaagtttggagactatatgccttcttcttgcttacaaaatcaagtaccctgagaacttttttcttctgaggggcaatcatgaatgtgcctcaataaacagaatatatggattttatgatgaatgcaagcgtcgatttaatgtgcggctatggaaggtcttcacagaatgttttaacactctacctgtggctgctcttatcgatgataaaatattatgtatgcacggtggactttctcccgatctagcacacttggatgagataaagaacttgcaacgtccaaccgatgtaccagatcaaggtctactgtgtgacttactttggtcagatccaggaaaagatgttcaagggtggggcatgaatgatagaggggtctcatatacctttggtgctgacaaggtttcagaattcctgcaaaggcatgatcttgatcttatttgtcgtgctcatcaggttgtcgaggatgggtatgaattctttgctgacagacagcttgtcaccatattctcggctcccaattattgtggtgaatttgataatgctggcgcaatgatgagcgttgacgaaactttgatgtgttccttccaaattctgaaacctgctgagagaaaacaaatttatggggccaaacaaaatgtgagatag

SEQ ID NO: 203 - DNA, 600 bp, Zea mays
gggagtttctcttcgaacagatgttgctgaatttatgaactaagaaataataataatccgctaaaatatccataacatgataacttgttactagcaacgttgaactattgattacaagaaactagtacaatacccataaattaggacgacacacaattatatttaatacacataaaataaaaaataaatttgttatcggaataaacattagtccacgttagatattaaattgataagaataaatatcaaacattatctcaaaaaagctgagaaaggtatacattcgaaatgagcttatcctttttgtaggctgttcggtcgctcatcatttttcacctaacaagataattctatgtgggagcgctagttgcgtggctcttaaagtctatttgtgatgtaatgtcctattagatataagaagccagaaagaggaagagacatacacgccatgtacgtgagggcgcacaagaccggtgtttaaaaaaagtagagatagagatattaaagtttttttaaagtaaaggtaaggagagagccggaatgagaagctttggagtacagtttaatttaaaaaacataagagttttttataatataata

SEQ ID NO: 204 - DNA, 1311 bp, Zea mays
atgatggcgccgtcccccgtcacgtgcagcccctccgcggcgcggcaccgcccgctgcagctccgctcccccgcgccgcgcgctgctgtcgtggcggcgctgccgctgcggaggagggaggcgctgccgcacgcgctgtggatcgcggcggacccgtgggcgtcggcgcgcgcgtggacgagtctgggcctgggcacgggcaggagggacgcggcgaggtgcgcggcggcggggcaggtcgcggggactagcagcgcgggcgtagggaggagcgccgggatggaggtggtcgtcgccgcggctgcggtcgtcgccatgggcacggggaaccgtgtcctctacaagctcgcgctcgtgccgctccggaagtacccgttcttcctggcgcagttcgccacgtttggatatgtagttgtctatttctcgatcctgtatcttcgatatcgagcgggcattgtcaccgatgagatgctgtctctaccacagaaaccttttctagctgtaggactcttagaggcctttggagcagcagcagggatggcagctggagctgttctttctggagcttcaataccaatactgtcacagacctatcttgtctggcagcttcttctatctgctatattcttgaagaggcgttatagaattaatgagatagcaggatgttttctagtggcaattggtgtcataataactgtagcaagtggatctggtactagcgcttcatttaaaagtagtggaattttatggccgctgctaatgataatatcgttctttttccaagctgccgatacaatattgaaggaaataatatttatagatgcttctaagaaattgaagtgtggctcggttgatctttttgttgtcaattcatatggctctgcttatcaagccctttttatgtgtatcttgctgcctttcctgtcaaagttatggggagttccattccatgtgttaccaacctacataaaagatggtgcagcctgctttttaaatatgggatcaatatctggttgtgaaggggcaccacttctaccactactatttgtgttggttaacatgggattcaatatatcattactaaacctactaaagatctcctcagcagtcatatcttccttggcttctacattctcagttccgctgtccatctacgctttcactctgccactgccgtatatcggtgcggcgtcatctctgccacctggctttgttgcgggtgcagcggtactcaccaccggcttactactatacagcctaccacaggcacaacattatgggaattctttccacaacaagaatgatgactag

SEQ ID NO: 205 - DNA, 363 bp, Zea mays
atgaagtcgagggcgaggtccggcggtggcgactccaggctctcggtgaggaagaccaaggttgagaaggacccaaacaagcccaagaggcctccgaccgcgttcttcgtcttcatggaggagttcaggaaggactacaaggagaagcaccccaatgtgaaacaagtctcagtgattggcaaggctggtggtgacatgtggaagtccttgtctgatgccgagaaggctccctacgtatctaaggccgagaagctgaaggttgagtacacaaagaagatggacgcctataacaacaagcagtctggaggaggacccacattgtctggtgattctgacaagtccaagtccgagggtgatgagtga

SEQ ID NO: 206 - DNA, 1797 bp, Zea mays
atggctgggctcccgccgcaaccccagcacgtccacgccctccccctcctcctcctcgtcgtcctcccctgcctcatcccctgtctccgcgcgacgaccgagatggcgccaaccgccgccaccgccggcgcatccgacgagggcgccagcgcgctgctcgggctcctgcagcgggtgcagtcggaggcgctgcgcacgctggggcctcacgacttcgaccccaagttctacgtcgacctgccgctggcgaccgacgagcgcgccgcggcggccgcccttgcggcgctgccgcgcccgtcgccgtcgcgggcggagctagacgacttcctgtcccgctacttcggggaccccgggtccgatctcgtggcggacgtcccaccggatttcgagcccgagccgcgcgggttcctgccccacgtccacagccccgaggcgcgggcgtgggcgctggaggtgcacgcgctgtggaagcgcctggcgcggcgggtggcgcccgacgtcgcggcgcggccggaccggcacacgctgatgccgctgcccggcagggccgtcgtgccgggatccaggttccgggaggtatactactgggactcctattgggtcatcagaggattgctggtgagcaaaatgtacgacacggcaaagactattgtgcttaaccttgtatacctgttggaaaaatatggtttcgttccaaatggtgcaagatcctactacactaaccgaagccaaccaccacttttgagctccatggttttagaaatatacagggcaactggtgatgtggagtttgttaggacagtattccactctctgcttaaagagcatagcttctggatgtcagagattcataatgttgctatagcagacaatcatggtcgggtccataatttatctcggtatcaggccaggtggaacaaacctaggcctgaaagtgcgacaattgatgaggaactggcttcgaagttgaattctatggcagctaaggaaaaactgtactgcgaaattgcttcaacggcagaatcgggatgggatttcagctctcgatggatgaggaattctactgacatgacaacattggcaaccacttacataatacctgtggacttgaacacatttctttttaagatggagctggatattggtgccttggctaaagtcgtaggagataatgcgacttcagaattttttttaaatgcttcgaaagcacgtcatattgcaattgactctattttgtggaactctgagatggaacagtggcttgactattggcttcctggtgatgcagactgtcaggaagtacacgaatggaagcctaactcacagaaccgcaacatatttgcttccaacttcgttccgctgtggctaaatgcataccattccgaattcgtacgctttgctgatgaggcaaaatcaaacagagtcatggcgagcctcaaggcatctggattacttcatgccgcagggatagcaacttccctgacaaacacgagccaacaatgggatttcccgaatggatgggccccactgcagcatcttatagctgaggggctgctgcattctggatcagaggccaaaaaactagctgaggacattgctacgaggtgggtgagaacgaactacgccgcttacaaagcaacgggtgcgatgcatgagaagtacgatgttgaggcttgtggagaatctggaggcggtggagaatacaagccccagactggttttggctggtccaatggcgtggtgttgtcattcttggaagaattcgggtggccagagggcaaggaaatagcttgttga

SEQ ID NO: 207 - DNA, 453 bp, Zea mays
atggcggcttcgctgggtctgaaccctgaagctgtcttcacttcctacacctcctcgccgccgttcatgtcggactacgtggcggcgagcttcctgccgccggccgtcgtcgactccacggacttctctgcagagctcgatgatcttcaccaccacttggattactcatcgccggcgccgaccttggccggggctcggagcgatcgcagcgagaagcagatgatcaggtggtgtgagggtggtggtggcgagaagagactcggtaggatcgggttcagaacgagatcagaggtggagatcttggacgatggattcaaatggaggaagtatggcaagaaggctgtcaagagtagcccaaatccaaggtacacccatatgttcacctggaatatagttaaaataaattcccagaacatgaaagcaacaagcagaaaagcaacgaagaagaaatag

SEQ ID NO: 208 - DNA, 594 bp, Zea mays
atgacgatggctcgtcctggggcggctttgccgctgctgctggtcgtggtcggcgcttgctgcgcgcgcctggcggcggcagtgcacctctccgcgctcggcaggacactcatcgtcgaggcgtcgccgaaggccggacaagtcctgcacgccggcgaggacacgataaccgtgacatggcacctcaacgcgtcggcgtccagcgtcgggtacaaggcgctggaggtgaccctctgctacgcgccggcgagccaggaggaccgcgggtggcgcaaggccaacgacgacttgagcaaggacaaggcgtgccagttcaggatcgcccggcatgcatacgccggcggccaggggacgctccggtacagggtcgcccgcgacgtccccaccgcgtcctaccacgtgcgcgcctacgcgctggacgcgtccggggcgccggtgggctacggccagaccgcgcccgcctactacttccacgtcgcgggcgtctcgggcgtccacgcgtccctccgggtcgccgccgccgtgctctccgcgttctccatcgccgcgctcgccttctttgtcgtcgtcgagaagaggaggaaggacgagtag

SEQ ID NO: 209 - DNA, 1332 bp, Zea mays
atgatggcagcctcgtcgtcgtcgtccttcaacctcagtgatcatctcgttcaagatgacctcccgtggcctgcttcttcttcttcttcctcccagctgccatttgctccttctcatcctcctcacggcgccattattggaggcagccagcaatggtggcagcaacctcaaatgctaaactgtgcagaccggcatccctccgacgagcttgaggtcctcctctcagcacaaggcagccaccaccaccaccaccatccttcttcttcagtgatccatcctcagctaagctcgctgctaatgatgcaagacctagggttccaatggagcagctgcggcagcttcgtggacacctcctcgtcgtcgcccatgccaccaccactggtgaacggccagcagcacgacggccacaacaagatcaaggagtgggaccgcccgctcactgctaataactcatcaaggtcatcgtgtgcgagcacagctatggcttgccgagatgtcgtcctcgacggcggcggcggcggcggcctccctgccatggccgccgtcgccgccgatcttgacgacggcaccgtgctcccggcgagcgtcaacgtcccccggacgacgacgacgcgccagaggccattcccggcggcgccgccacctctccccggcgacgcgttcgagatactggcttcgtcgaggctatgcaagaccctgctgcttagccaagcttcttcttcggtactgctccataatggcacgacgatgcctttgttgagatcagagcatgtgccctatggccctcctgctcctgctcatccccaaggaccatccatcggcaactacaagcagtgcatgcagatgggcgcgtcttgtggaggccgcgcgcagcacgaagcggcatgtcaaagcatggcggcggcagcagcacgcccagcactgccagtggtgccgtcgtcgaagaagcctcgagtcgagcagcggtcctccaccatcgtcccttctttcaaggtaaggaaagagaaattaggggaccggatcgctgctcttcagcagctcgtctcaccgtttggcaagactgataccgcatctgtgctcatggaggccatcggttacatcaaatttcttcaagatcaagtcgagactctgagccgcccctacctgaaatcctccagaagtaagaagcccaggccgacaccgcggggttcttcaaacgcgagcgctggggagctggaggaaacgaggcctgacctccgcagcagagggctctgcctggtgcctctctcgtgcacgtcctacgtgaccaacgagaacggagtctgggttccaccgaattttagggcaaactaa

SEQ ID NO: 210 - DNA, 849 bp, Zea mays
atgagctcgtcgatcagcatgatggaggcgagaatgcctccggggttcaggttccaccccagggatgacgagctcgtgatggactacctcctacaaaagctctccggccatggccaccatgccggcgctgccatcgtcgtcgacgtcgacctcaacaagtgcgagccatgggacctcccagattccgcgtgcgtgggtgggaaggagtggtacttcttcagcctgcgcgaccgcaagtacgcgacggggcagcgcactaaccgcgccacgcactccggctactggaaggccaccggcaaggaccgcgccgtcgtcgccggcggcgaggtggcggtggggatgcgcaagacgctggtcttctaccggggccgcgcgcccagggggaagaagacggagtgggtcatgcacgagttccgcctccacccccatgccgcgccgtgcctgctagcagcagctgcgccaaacaaggaggactgggtgctatgcagggtgttctacaagagcagaacaaccagcccaaggccagaatctgaagacgcccgggacggcaccccatcagctgaaccgcaactgccggctgccctgccgcttgcgcccctcgctgacacctacgccgccccaacggttgcagagcaggtgtactgcttctccggtctgccggcactgccattcagaagaccagtgagccttggggaccttctggagttcgacgcctccgagaaggaatctgtcacgacagcgatgaccagtgtctcgaacaacactagttcagtgctggagctggctccaaattgcaactggaaccaggaaaatggcatgtcacggatgtggagcccccttgggatatga

SEQ ID NO: 211 - DNA, 891 bp, Zea mays
atgatgatgatgggcgaaggcgtgagcgtgccgccgtggtcccaccacgtccccgtgagcggcgtcgacgccggcgtcggcggcgacgagatgacgccgtacctgctggcggcgctgcggcagtacctgccgtgcaacgacgccggcgccgccgaggcggacgacgaggaggcggcggccatggccgcgggcgtggacggctacggctgcgacgagttccgcatgtacgagttcaaggtccggcggtgcgcccgcgcgcgcagccacgactggaccgagtgccccttcgcgcacccgggggagaaggcgcggcggcgcgacccgcgcaggtaccactactcgggcgccgcctgcccggacttccgcaagggcgggtgcaggcgcggcgacgcctgcgacttcgcgcacggcgtcttcgagtgctggctccacccggcgcgctaccgcacccagccctgcaaggacggcacggcctgccgccgccgcgtctgcttcttcgcgcacaccccggaccagctgcgggtgctcccgcccacgccgcagcagtctagcgccagccccaggggcgccggcgcgctgcccgagtcctacgacggctcccccggctacccggcgtccgcggctgcctacgggtcgcccacagcgggcgggctctacagcctgccctccaccccgacagccctcgccaccgcctccggctacatgcccaacctggagccgcttgacgtcagcttcggcggcgacgaggagcccgtggagagggtggagtccgggcgggccctccgcgccaaggtgttcgagcggctcagcagggagggcgctgtttcctgctacccagctgccggaaccggtggccccgacgtcgggtgggtctccgacctcatcaactga

SEQ ID NO: 212 - DNA, 1386 bp, Zea mays
atgggatccaaggaccaggacggaggggctgcatcctcgggaggcggcttcttctcgtcgttcgccgccggcatgcgcagctggggcaccgccgtgcataaatccgtcaacgggctgcttggttatgaaggccttgaagttattaaccccgatggaggcacagatgatgctgaagaagaagctttgaaggggagatggaagcaggaggaccgtgatagctactggaagatgatgcacaaatacataggatcagatgttacatcacttgtgacacttccagtcataatttttgagccaatgacaatgcttcagaaaatggccgagttgatggaatactgtgaattgttagacaaagcagatgaatgtgaggatccatacatgtgtatggtttatgcttctacatgggctgtttctgtgtactttgcatatcaacgcacatggaagccttttaatccgatccttggagagacttatgagatggttaaccaccagggcattacatttcttgctgagcaggtaagccatcatcccccaatgggtgttgctcactgcgagaatgaacattttacttacgatatcacgtctaagttgaagaccaagtttttgggaaattcagtggaaatttacccagttggaaggactcgagtgacactaaaaaaatctggtgtcgtgttggatttggtgccaccactaacaaaggttaacaacctgatatttgggcgcacttgggttgattctcctggagagatggtcatgacgaacctgacaactggagacaaagttgtgctatatttccagccatgcggctggtttggggctggccgttacgaggtggatgggtatgtgtacagtgcagcggaagaacccaaaatcatgattacagggaagtggaacaagtccctgagttgccaaccatgtgaccaagaaggcgatcctcttccaggcacggagctgaaggagatctggagagttgctcctgccccacagggcgacaagtatcagtacacacacttcgcacacaaaataaacagcttcgacacggcacctaagaagctgttggcatctgattcacggctgaggcctgatagatatgccctcgagaagggtgacatgtctaagtccggggcagagaagagcaggctcgaggaacaacagagagctgagaaacgaactcgagaggccaagggcgagcaatttactcctagatggttcaacctgacagatgtggtctcccctacaccgtggggtgacctggaaatttatgaatacaacggcaaatacacagagcaccgggctgccatagaccgctccgatgtcaccgacgagacagatgtcacttcagtcaagttcagcccatggcaatatggtagctcatcttcccaatga

SEQ ID NO: 213 - DNA, 360 bp, Zea mays
atgcacctgctcgacgacctccgccaagaccgcggcggcgcggccgcccacaccggcagccgcagtcgcaagccgcccccgccccttgccgccgccgccgccgccgccgcgggggtcccggcgggctcctccaccgccgccaccgccacccacctgggcccggaggcggcggcgctgctggcgtgcgtcacggccacgctgctgctgcttccgctggtcctgccgcccctgccgccgccgccgccgctcctcctcctcgtgcccgtcgccatcttcgccgtcctgctactcctcgtgctcctcccctccgacgcccgcgccgccgtcgccacgcccacctcctccgcctcctacttgtag

SEQ ID NO: 214 - DNA, 1158 bp, Zea mays
atggaacgacaggggatggagggcaacaatcttctgcattttcttgataccccgagcgcccattacagaaggacatgcgacggatttgaggcccaacacggcggcgatgaacactctgagacatcagatactgatccggcgaatgcaagggaaatgctggaatatttgttgaaccaaccagcaaacaaaatctgtgcagactgtggctctccagatccaaaatgggtggccctgccttttggcacattcatctgcattaagtgctctggaactcatagaagtcttggtgtgcacatatcaaaggtgatttcagtgaatctggatgagtggacagatgatgaagtcaactgtttagctgaatcaggcggaaattctgttgtgaactcaagatatgaagcctttttacccgaaaacaaaaagctaaaacaagattgctcaacggaggagcgtaatgattttatcaggaaaaaataccagtttcaacagtttgtgtgtgatccacaattttcatgccctttaccacttaacagaaagcatgcaccaccagataaaaatcaccagcagcataatagcagcaagtatggttttggccatacttttaggaatagctggagaaaaaaggattcagatagcaaaagcctaaagaaaatgtcggatgtgggaatgatagaatttgttggattagtaaaggtcaatatcgtaaaaggcacagatttagctgttcgtgatgtgatgtcgagcgatccgtatgtcttgattcatctagggcaccagtccatgaaaacaaaggtgataaagaacacactgaatcctatctggaatgaaagactaatgctttcgatccctgacccaattccgcctcttaagctgcaagtatttgacaaggacacattcagctccgatgaccggatgggggaggccgaggtggacatccggccgctgattgcagcaacgaaggagcacgagaactcgaccatcaccgaatcgacagaactctacagatggtcagccagcgaagacagcaacggtgtgctcgccaaggacagcgtcatctctgttgcgagtggaaaggtcaagcaggagatcacactcaggctccagaatgtcgagcgcggtgaggtcgagatcgagatcgagtgtgtgccgctcagccagtag

SEQ ID NO: 215 - DNA, 318 bp, Zea mays
atggggagccctctgggcgggtggccgtcatacaacccgcacaacttcagccagttggtccctgccgacccctccgcgcagccctcgaatgtcacaccagccacttatgttgcgacccacaggacagatccgccacccaatcaagtgataaccacggaggccaggaacatcctgctgaggcacttgtaccagaaatccgaggagaagctgaggccaaagagagctgcggcggacaacctcgctccggagaacaacaacaagaagcagcccaggggacctgtgggcgacgtcgggggccagtcgagcgcaagaagctga

SEQ ID NO: 216 - DNA, 1698 bp, Zea mays
atggggcggtcgcgaggggtgcagaattccggcgacgacgacaccgtacacaggtcgaagcggaggagggtcgcatcgggcggggatgcgacggactccgtttccgctggcatcgggggagctggagaaggagggggcaagaaagcgctctaccactgcaattactgcaacaaggacatctctgggaagatacggatcaaatgctccaagtgccctgacttcgacctttgcgtggagtgcttctctgttggcgctgaagtcaccccacatcgcagcaaccatccttacaaagtcatggacaacctgtctttcccacttatttgcccagattggaatgcagacgaagaaattctcctccttgagggaattgaaatgtatggtctgggaaactggcttgaagttgcagagcatgttggtaccaagtctaagttacagtgtattgatcattacacaacagcatacatgaactcaccttgttatcccctaccggatatgtctcatgttaatggcaagaacaggaaggagcttctagctatggctaaagtgcagggtgaaagtaaaaaagggacttcactgttgcctggagagctgactcctaaggctgaatctccattttctccctccagggtcaaggtggaagatgcacttggagaaggtctagcaggtcgatcaccttcgcacatagctgttggtgcaaataaaaaagcttcaaatgtgggacatattaaagatgggtctaatgtatcaaaagttgaagatggtcatgtcgatagaagtgttggtgtgaagaagcccagatattctgcagatgaaggcccttcgttgactgaactgagtggatacaatgcaaagagacacgagtttgacccagagtatgataatgatgccgaacaagcgcttgctgagatggaatttaaagaaactgattcagaaactgatcgtgaactgaaactccgtgtgctgcgtatttatctgtccaggcttgatgaaagaaaaaggagaaaagagttcatattggaaaggaatttattgtttcctaatcccttggagaaggatcttacaaatgaagacagggaagtttaccatcggtataaggtcttcatgcgttttctttccaaggaggaacatgaagcccttgttaggagtgtcattgaagagcgaaaaattcggaggagaattcaagaactccaggaatgtcgttctgctggatgccgcacacttgctgaagcaaagatacacatagagcaaaagaggaaaaaagaatacgagctgaatgcccaaaaagctaaggaaagtaaccaccttattgcaaatactaaattggtgcagaagatgaatcgacctatgaagattgagtctgatgggaatttggatccaaagaaaggtggtgttggcttagattctcctaaaactacaggacttacaagtgttaagcagtgggatgactgggatatagttggtcttcctggggcggagctattaagtgctagcgaaaagcttctatgttgccagaacagactgctacccagtcattacctgagaatgcaggaggtgctgatgcaggagatattcaagggtagtgtcctaaagaaggaagacgcacacgtcttgtttaaggttgatcctaccaaagtagatagtgtttatgatatggtaacaaaaaagctgggcaaccatgtggagttgcctacggtctag

SEQ ID NO: 217 - DNA, 1698 bp, Zea mays; identical to SEQ ID NO: 216

SEQ ID NO: 218 - DNA, 951 bp, Zea mays
atggagaggtggggggacaaggacaggggggcggcggttccggcgccggggaggttgaggcggtacgccgaccagccgtccttctcgtcctcgctcctcgacgccatatacaagtccatggacgagcccggcgacggggcaacatccgccgccgccgcgggagcgaccaagatgcagagccaccaggacctgcactacagctactactacaagacgtcgctggcggggagctaccgcggcagcagggctgcggcggcggcgcacgccgccaccaccacgtcgagctcctccgaatgctcgagctacggtgggttctcgtcgtcggaggcggagtcgtcgcagcaccggcggctgcggcccatacgcacgagcgtgggcgcggccgcgtcgcccgcgcccgcgccggagaagaagaagaaggccggcgccaacatccgcgccaagctgagggacctccgcaagccggcgtcccccggcgcgcggctggcggggttcctgaacaccatcttcagcggcaggcgcgcgccggcgacgccgccgtcgcggggcgcggagtcctccgcgtgctccacggcgtcctcgtactcgcgctcctgcctcagcaagacgccgtccacgcggggccagccgaagcggaccgtgcggttcctggacagcgacgacggcgaggcggcggcggcggcgcccggcggcgagcggcggagggtgcaggtcggggtggcggagctggagcggatgctgctccaccggatggagatggacagcgacgaggacgacgaggacgaggagggcagcgacgccagctccgacctgttcgacctcgagaacttcgcggccggtgcccccgacgccgcggcggcgtacagggacgagctgccggtgtacgagacgacgagggtggtgctgggacaccgcgccattggccacgggaggagtgccagggtggtgtga

SEQ ID NO: 219 - DNA, 1413 bp, Zea mays
atgggcgcctttctgctcttcgtctgtctcctggcgccggtcgtcgtgctcgcctgcgccgtccgcggcaggaagcggcgggcgtcctccgcggcggcgggcggcaaggcgctgccgctgccgcccgggtcgatggggtggccgtacgtgggcgagacgttccagctctactcgtccaagaaccccaacgtgttcttcgcccggaagcagaaccggtacgggccaatcttcaagacgcacatcctgggctgcccctgcgtgatggtgtccagcccggaggcggcgcgcttcgtgctcgtcacgcaggcccacctcttcaagcccaccttcccggcgagcaaggagcgcatgctggggccgcaggccatcttcttccagcagggcgactaccacgcccacctccgccgcctcgtctcccgggctttctcccccgaggccatccgcggctccgtgccggccatcgaggccatcgcgctgcgctcgctcgagtcctgggacggccgcctcgtcaacaccttccaagagatgaagctgtacgcgctgaatgtggcattgctgtccatcttcggcgaggaagagatgcggtacatagaggagctgaagcagtgctacctgaccctggagaaggggtacaactcgatgcccgtgaacctgccgggcaccctgttccacaaggccatgaaggcccgcaagcgcctgggcgccgtcgtggcccacatcatcgaggcccggcgcgagggcgagcggcagcgcgggagcgacctcctggcctccttcctggacgaccgcgaggcgctcaccgacgcccagatcgccgacaacgtgatcggcgtcatcttcgccgcccgcgacaccaccgccagcgtgctcacctggatggtcaagttcctcggcgaccaccccgccgtcctcaaggccgtcatcgaggagcagcaggagatcgcgcggtccaaaggctcctccggcgagcccctgacgtgggcggacaccaggcggatgcgcacgacgagccgtgtgatccaggagacgatgcgggtggcgtccatcctgtccttcaccttccgggaggccgtggaggacgtggagtaccaagggtacctgatccccaagggctggaaggtgatgcccctgttccggaacatccaccacagccccgaccacttcccctgcccggagaagttcgacccctcccgattcgaggttgctcccaagcccaacacgttcctgccgttcggcaacgggacccactcgtgcccgggcaacgagctcgccaagctggagatgctcgtgctcttccaccacctcgccaccaagtacaggtggtccacctccaagtccgagagcggcgtgcagttcggccccttcgcgctgccgctcaacggcctgcccatgaccttcgtccgcaaggactga

SEQ ID NO: 220 - DNA, 1077 bp, Zea mays
atgtcgatggcgcaggtctgctgtgactcggccgtagcggcgacggcggcaccggtggttggtgcggaggcggaggccagggccagggcgcgcgccgagaggcggagccgggccggagagtctggggcgtggaagcacgcggtggccgctggcacggccgatgctacgaggaagcggagtctcggggcaggggagctgctggtggcgcggaagcacggggcggcgtcggtggccggccgcaggagggagatggaggatgccgtgtccgtgcgcgacgcgttctgcgcggagggcacggccgacggcgggaggcgcgacttctacggagtgttcgacggccacggctgctcgcacgtggccgaggcgtgccgggaccggatgcacgagctggtcgccgaggagctcgccgccaccgccgccgacagctcagtctccgcggcggcggcctggaccgtggcgatggaacgcagcttcgcgcggatggacgccgaggtgacgtcggccggcgggcgcgccgccgccgccagaagcagcacctgccgctgcgacgcgcacaggtgcgaccacgtgggctccacggccgtggtggccgtcgtggaggagcacagcgtcattgtggccaactgcggcgacagccgcgccgtgctctgccgtggggacggcgcgccgccgctgccgctgtcgtcggaccacaagcccgaccgccccgacgagctggagcgcatcgagtccgccggcgggcgcgtcatcttctgggagggcgcgcgcgttctgggcgtcctcgccatgtcccgcgccgtcggggacggatacctgaagccgtacgtgtcgtccgttcccgaggtgacggtgaccgaccggtccgacggcgacgagtgcctcatcctgggcagcgacgggctctgggacgtggtgagcaacgaggccgcgtgcgaggtggcgcgcgcctgcctccgcaggggccgggccaagtggtgtgccgaggccgccgcgttgctcaccaagctggccctcgcgaggagaagctccgacaacgtctcggtggtcgtcatcgatctccggaggaggaatcactag

SEQ ID NO: 221 - DNA, 1536 bp, Zea mays
atggagacgcaagtggcggctccgccacaccagcagcagcaacagcagcagaaggcggccaacctggcgcgcaccttcaccaagctgctccgccgcaagcgcgccgaggccgcggcgcagggcggcgcgcccgaggcgcccgcttctgtggctccaggagacgcgctggaggaggagcggacggagcctccgcccgccatcccgtccctcagcaagctcaagctgtcggggaacctcgccgccgcctactccttcgacgccttcttccgcaacgccgccgagaagaaggcggcggcggcgggagggggagcggtccggcagcctgcgggtgcgggggaggtgacgctggaggccgcggcggatgcgctgctggccaacctcttcgcgggggtctcggcggtgaaggcggcgtacgcgcagctgcagctcgcgcagttcccctacgacgcggaggcgatccagtccgcggacgccgccgtggtcgccgagctgacgaggctctccgacaccaagcggaggtacctgagggaccccgccgccgcggcccggggcgcggcggcggcgggccacaccgcgctcgcggcgcacgccgaggagcagcgccacctcctcaagacgtaccagatcacggcgcgcaagctggagtcggacctccgggccagggacgccgaggccgagcgcgccaggagctccctgaccggcgagctccgcgccgagcgcgccctggaggcgcggctccacccggggcggaccctggcgtcgctggacgagctccacctctcgggcctgaacccgacccacttcctgaccgcgctgcggcacacggtgaagtcgatccggtccttctccaggtcgatgctgagctcgatgcagtccgccgggtgggatctgggcgcggcggccgccgccgtgcacccgggcgtcccgctccggcgcgccggcgacgccaagttcgtgttcgagtcgtacgtggcgatgaagatgttcgccaacttccaccgccgcgacttcaacttcagcttcctgggcgagcgggagttctacgagcggcggcgcttcttcgaggagttcacggagctgaaggcggagccggcgagcgcgttcctggacgcgaggagcccgcggtggggcgggctcggcaagttcctgcgcgccaagtacctgtcgctggtgcacgcgcggatggagacggccttcttcgggcggctggagcagcgcggcatcgtgagcgccgggcccgggttcccggagagctcgtggttcgcggacttcgcggagatggcgcgccgcgtgtggctgctgcactgcctcttcttcgcgttcgacggcggcgccgaggaggacggcgcgtccatcttccaggtgcgcacgggggcgcgcttctcggaggtgtacatggagagcgccagcgacgggagcgccggcgacgacgccgaggaccgcgtggtcggcttcaccgttctgccggggttcagagtcgggcggacactgatccagtgccgcgtctacctgtccaagccggggcggcggccgtga

SEQ ID NO: 222 - DNA, 1929 bp, Zea mays
atgatgggaggcgggctgttggtggatcagagcgtggtgttccctggcgtccacaacttcgtggatctcctgcagcagaacggcgacaagaacctgggcttcgggtctctgatgccgcagacgtcctctggcgaccagtgcgtgatgggggagggcgatctcgtggacccgcctccggatagcttcccggacgccggggaggacgacagcgacgatgacgtcgaggacatcgaggagctggagcgccgcatgtggcgcgaccgtatgaagctgaagcggctcagggaactgcagcagacccgcggcaaggactcgttggctagcggtgcgggactggctgatggctcgtccaagccaaggcagtcgcaggagcaggcccggcgcaagaagatgtcgcgcgcgcaggacggcatcctcaagtacatgctcaagatgatggaggtgtgccgcgcgcaggggtttgtgtatgggatcattccggagaagggcaagccagtgagtggtgcctccgacaacctccgtgcgtggtggaaggagaaggtccgcttcgaccgcaacggaccggccgccattgccaagtaccaggccgacaacgccgtccctggcgccgagaacgagctcgcctcgggcgctgccagcccccattccttgcaggagctgcaggacactacgctgggctcactgctctcagcgcttatgcagcactgcgagcccccacagcggcgctacccgctcgagaagggcgttcctccaccgtggtggcctaccggcgacgaggagtggtggccggaactcggcattcccaaggaccagggcccacccccgtacaagaagcctcatgaccttaagaaggcctggaaggtgagcgtgctcaccgctgtcatcaagcacatgtcaccggacatagagaagatccgtcgcctggttcgccagtccaagtgcctccaggacaagatgactgccaaggagatctcaacctggctggcggtcgtcaagcaggaagaggagctgtaccagaagctgaacccgggcgcacgcccaccggcgtctactggtggcatcgcaagtgccatatccttcaacaccagctcgagcgagtatgatgtggacatcatcgatgagtgcaagggggacgaggccggtaaccagaggacggcagtcactgacccaaccgcgttcaaccttggtgccgctatcctaagcgacaagttcctcgtgccgacgccgatgaaggaggagaccgccgacgtggagttcatccagaagaggaacgcccccgctgcagccgagccagagctgatgctaaacaaccgattgtacacctgcaacaacgtccagtgcccgcgcagtgactacagctacggattcctggaccggaatgcccgcaacagccaccagtacacctgcaagcacaaggatccaacccctcagagcaccgagaacaagccgccgtcagcaccgccacagccacaagccttccagccggccttcagccaacccaaccaggcactgaacagtctggatttcagcctgcccatggacgggcagaggtccatcgccgagctgatgaacatgtacgacaacaacttcgtgccgaacaagaacccgagcagcgacagcgtcgccgtcatggagaggccaaacgcgatgccccagcagaggatccagatggacgagggtttcttcgtacagggcaacggagccttcgacgacgtcaacaacagcatgatgcagcagcagcagcagcaggcgccagtgcagcagcagcagcagttcttcatccgcgacgacacgccattcgtgagccagatgggcgacatcgccgccagcgcgccggagttcaggttcggtcctggtttcaacatgtctagcggcgtcgactacccaggcgcggcacagaggaacgacgggaccaattggttctactga

SEQ ID NO: 223 - DNA, 357 bp, Zea mays
atgatgctgcactgcacatttgctatatctgaggctcctgcgcgcgccttggcccttggccaggtgtctgtcatgcgggcgatgccgcaggaagaagaagccgcggtggcgacgacgaccatggccgggggcaaggtggcggcgctgctggccacggcggccgcgctgctgctgctgctcccgctggcgctgccgccgctgccgccgccgcccacgcagctgttgttcgtccccgtggtcttgctgctcctcgtggcgtccctcgcgttctgccccgccgcgacctcctcgccgtcgccgatgcatgccgccgaccacgggtcgttcgggaccactggatcaccgcacctatgttga

SEQ ID NO: 224 - DNA, 1857 bp, Zea mays
atggcctcctcgccgccgcgcgccccgcagctattccctttcgaccttaacgtcgcgcaggaggaggtagatgaggagccgattgaggttcttgaggaggatgtcgatgaggagggagccccgttggcgcagccccaggaggttgtcgtcgaggaggttgttgagaaattggtcgagcacgcggtgcctatcacggaggatgaacctgcggaagacgtgatcatggaggagccttcggaggaggtgatcatggaggacgaggagcctacgccgtcgccggcggaggaggtggttggggaggggaagaggaggaaaaagagggtggactatgaggtcttcgtgtccgggctgccgcaggacgccgctgaggaggacgtggcgcaggcgctggcggatgccggagatatcgaggaggtgcgcctcgtgcgggatccggcggaccagcggctcaacaagggattcgcttttgtccgcttcgcggctgcatggcaggcccggtgggcggccaacgacctccgcgaggctacgattaagggaaaagcttgtggaatatgcaagaacagtgaaactgaaacccttcatctccgaaatatatgctttgattggtcaaaggatgatttagctgaaaaactgaaacccttcaagttggaaaacttggatagaattaatctaattgagcacccagacagaaagggtaaaaacagaggctatgcgtttcttgacttcaggactcatgtagatgctgtggaggcttttgtgaaactacaaaaaatagatctgtatcttggtactgactctagagcaaacatatcattttcaaacactctttcacaagatgatgagatcatggaaaaggtgaaatctgttttcttggatggcgtaccacctcactgggatgaagacaaagtgagagaaattttcgggaaatttggtgaaattgatagcatacaacttgctagaaatatgttcacggcagcacgaaaagattttggtttcattggctttacagcaagacagtcagctttagactgcattaagatggtcaataaagatggtgttggtgaaggtagtggaaaggttcccataaaagctagtttacaaaggccaaggcatgctttcaagaagtattcccggcaaggctcaagttccttgctaggcgtcagaagaggatttgtagataaaagttctagtggtagaggacaccactcggacagatataggcattttagtcctgtaaggcgttcgtattcagataatcattctcgccgtcactctattgatgttgaagagaggcatacttctgtgcgaggatacagagcttactatagaagagactctccagtgcatgccccaagctataaatatggaaggacacatctggagaccagaatcagcgaagaatatactgagggaagatacactagtaaatatccaaaacacagacacacgatgcatggaaccatggagcgagatgcaaaccgcaggatcaagtatggacattcataccaggagagggcacatagaacttgcccaggttgtaagctgtgtggtcaaaattacaattaccccaatggtgaggaattttctgcaatcagcggttgtcaggaggcatactaccagacagaccatgatctgattccttcaacttctcaagtagcatctcattgcgagggttcttgctgcaagggccagcagttgaaaccgaaaagttattctgtgatgcgtgattatgactatatcaatcaagagtcaacacctagttcaagtgaccatgccagaacaagatctaatcttccagcgccgcctcatcattggcatgttaaacattctaatgagcatcggaggtatgtatcatga

SEQ ID NO: 225 - DNA, 984 bp, Zea mays
atgctgtcttctcaccgcgagagcctgctgccctacgcgccggggcggcgggcggcggtgctgctcgaccaccggcggtaccgcccgaacgtcgaggtggcgcccagctgcccgcgctgcgactcgcccaacaccaagttctgctactacaacaactacagcctcagccagccccgctacttctgcaagggctgccgccgctactggaccaagggcggctccctccgcaacgtgcccgtcggcggcgggtgccggaagaaccgcagcaggggcaagccggtccgagccgtggccgtcgattccgtggcgcccagcagcggtggcgcggcggcgttcacgcaccgggcgtcggcgtcgtcgtcgtcggcgtcccccgccacgctgcggccggacatgctactggaaggcatgctcggcagcccaagcgagctgtgccagctgacggtgacggacgacgacgcagcggaaaacccggctgtggcgcccgatggacccaggatcgacctggcgttgctgtacgccaagttcttgaaccaacagccgccggcgcccgagcggcgcgccgtcctgccggaatcgctcgtcgtcgacaccttgagcgggtcgtcgtcgagcgacgtgggtcccgtcgtcccatcgcgggatcatcagccgttcacgacgcaagacgacgggctgggcgagctgtccgcggcggcgagcgcagagccgagcgctcctccgccacagtcgtcgtcgtgtgcggaggcgcttattggggcgttcggcatggaccagcgctgctacgactctctgggtttgccaccagacggcggggatctagtcctaccgtcgacgtggcctcttcttggggccaagtacgagctgttcgatccgctacctgaggacgccgtgagccttcaggacggcttcgccggcgacgaggacgtgtggagcggcgccttggcttgtcaagggctggaagcagctctctgcaggccgtaa

SEQ ID NO: 226 - DNA, 699 bp, Zea mays
atggagtacgccgccgtcggctacggctacgggtacgggtacgacgagcgccaggagccggcggagtccgcggacggcggcggcggcggcgacgacgagtacgcgacggtgctgtcggcgccacccaagcggccggcggggcggaccaagttccgggagacgcggcaccccgtgtaccgcggcgtgcggcggcgcgggcccgcggggcgctgggtgtgcgaggtccgcgagcccaacaagaagtcgcgcatctggctcggcaccttcgccacccccgaggccgccgcgcgcgcgcacgacgtggccgcgctggccctgcggggccgcgccgcgtgcctcaacttcgccgactcggcgcgcctgctccaggtcgaccccgccacgctcgccacccccgacgacatccgccgcgccgccatccagctcgccgacgccgcctcgcagcaggatgagactgccgccgttgccgctgacgtggtcgcgccctcgcaggcggacgacgtcgccgccgccgccgccgccgcggcggcgatgtacggcggcggcatggagttcgaccactcgtattgctacgacgacgggatggtgagcgggagcagcgactgctggcaaagcggcgccggcgccggcggatggcatagcatcgtggacggcgacgacgacgacggcgccagcgacatgacgctctggagctactga

SEQ ID NO: 227 - DNA, 480 bp, Zea mays
atggctgctgctgccactgctactccgtccgtggcgccggaggccggcgaccggaaggcggtggcaccgccggtcgacgcggtggatctggatctggagctggagctggaggagaagcacgtgctggcggtggacgacagctccgtggaccgcgcggtgatcgccaagatcctgcgcagctccaagtacagagtgacgaccgtggactcggcgacgcgcgcgctggagctgctggcgctggggctggtccccgacgtgaacatgatcatcacggactactggatgcccgggatgaccgggtacgagctgctcaagcacgtgaaggagtcgtcggcgctgcgggcgatccccgtggtgatcatgtcgtcggagaacgtgcccacccgcatcagccggtgcctggaggagggcgccgaggacttcctcctcaagcccgtccgccccgccgacgtctcccgcctctgcagccggatccggtga

SEQ ID NO: 228 - DNA, 489 bp, Zea mays
atggggatctcgagcatgccggagccgcgggacagcctgctggggtacctggtgtacaacgcggtggtgtcgatcgcggcgctggcggggctggtgcgggcggcgctggtgttcctggacctgcaggccgcgcagctgcccgggggcgcgggcgcgggcgcggacgacgaccgtctcgcggcgtcgggcccgggcctgggcctggcggagcggttcctgagggccttccggccggcgctgtacggggtgctggtgtccacggcgtgcggcgcggcggaggcggccgcgggcgacgacgactgcagcgtgtgcctggccgggttcgaggcggaggccgtggtgaaccggctcccctgcggccacctcttccaccgcgcctgcctcgagacctggctccggtacgagcgcgccacgtgcccgctctgccgcgcccacgtgcccctccccgccgacgagacgccggtgctccgctacccggagctcgagtga

SEQ ID NO: 229 - DNA, 564 bp, Zea mays
atggctaatgactccttgacgaggggccacataatcggggatgtcttagacccgtttactagctcagtgtctctaagtgtcctgtatgatggcagaccagtgtttgatgggatggagtttcgggcgtcggcggtgtcggtgaaacctagagttgagattggaggtgatgattttcgagtggcctataccctagttatggtggatcctgatgcgcctaatcccagcaaccctagcctgcgggaatacttgcattggatggttactgacatcccagcatcaacagatgatagcttcggccgagagctcataccatatgagagcccaagccccaccatgggcatccaccgtcttgtgttggtgctctaccagcaattggggcggggcacggtgtttgcgccgcaagttcgtcagaacttcaacttgcgtaatttcgcacgccgtttcaacctcggcaagcctgtggccgcgacgtacttcaactgtcagcggcaaacaggcacaggtgggagaaggttcacttgtgtttttgatcatgtcgttcaaggtgaaggccggcaagcttga

SEQ ID NO: 230 - DNA, 924 bp, Zea mays
atgaggccccccggccggcgccgcgtcctcgccgccggcgcctgcgcgctgctgctggccgcgaccttcctggcggccggcctgttgacgacgtcctccctggcgccgtacctgctgccgccgctggccctgtcgctgccgtgcctgccggcggtgaccgcgccggcggggtccgggtacggcgcggcgccgggcgtggcggcgctggcggaggcggccgtggcgtacgcgacctcggagaccgtgccgcagcagtcggtcgacgagatctcgctgtcgctggccgtgctgcggcggcgcgcgccgctgcggctgctggtgttcgggctgggccacgactcgaggctgtggcacgcgctgaacccgggcggcgccacggtgttcctggaggaggacccggcgtggtaccgcgtggtgcgggcgcagtcgccgttcctgcgcgcgcacctggtggcctaccgcacgcgcctcgaccaggcggaccggctcctggccacgtacaggcggcacccggcctgcctccccggcggcggcggcggcaacgacaccctgcagctgccgcgcgtgcgcggcaactgggcgtgtccgctggcgctgtacaacctgccgcccgaggtgtacgagaccgagtgggacatggtcatgatcgacgcgcccaaggggtacttcgcggcggcgcccgggaggatggccgcgatatggaccgcggccgccatggcccgcgcgcgccagggcgagggcgacaccgacgtcttcctgcacgacgtcgaccggagggtggagaaggcgttcgccgaggagttcctctgcgagagattccgggtcggcggcaccggccggctctggcatttcaggatcccgccagtttcacggcgtggggaggacggcacggcgaccgccggtgaccggaacccgttttgttaa

SEQ ID NO: 231 - DNA, 2007 bp, Zea mays
atggccgcgctccttcagtcgtctttcctcttccctcacgccaccttccccaaccccaagccccaccacctcgccgccgccgccgccacgagacccgagtcacccaacgtggcccccaatcccgccagcgcccgcctccgccgcctcattgcccgcgaggacctcgccggtgccgcgcgcctcgtcgagctctccgcctcccgcgacggggaggcccccgacgtctacctctgcaccaagctcatccggaacctctgccgccggggccgcacctccgacgccgcccgcgtgctccgcgccgccgagggctccggctcccccgtcgacgtcttcgcctacaacaccctcgtagcggggtactgccgctacggccacctcgacgccgcgcgcaggctcatcggctccatgcccgtcgcgcctgacgcctacacgtacacgccactgatccgcgtgctctgcgaccgcggcagggtcgccgacgcgctcagcctgctcgacgatatgctccgccgcgggtgccaaccaaacgtcgtcacctacactgtgctcctggaggccatgtgcaagaacagtgggttcgagcaggccatggcagtcctcgacgagatgcgcgccaagggatgcacacccaacattgtcacgtacaatgtcatcatcaatggcatgtgcagggaaggccgtgttgatgacgcaagggatctcttgaacaggttgttctcttacgggtgccagcctgacactgtcagctataccaccctcctcaagggtttgtgcgcttccaagcggtgggatgacgttgaggaactatttgctgagatgatggagaagaactgcatgccaaacgaggtgacgtttgacatgctaatcagattcttttgccgaggaggtatggtggagcgggctattcaagttcttcaacaaatgacggagcatgagtgcgccaccaacaccaccttgtgcaatattgtcataaactcaatttgcaaacaaggccgggttgacgatgcctttaagttcttaaacaacatgggttcctacgggtgcaatccagataccattagctataccacagtcctaaagggcttgtgtcgtgccgaacgatggaatgatgccaaggaacttttgaaagagatggtccggaataattgccccccaaacgaggtaacattcaatacatttatctgcatcttgtgccaaaaggggttgatcgagcaagctattatgcttattgaacaaatgcaagagcatgggtgtacagtgggtgttgtcacatacaatgctcttgtcaatggattctgtgtgcagggccatattgacagtgccttagaattgtttcgcagcatgccctgcaaaccaaataccatcacatacactactttgctgacaggcttgtgcaacgctgaacggttagatgctgctgcagagctcgtagctgaaatgcttcatagggattgccctccaaatgtagtgactttcaatgtacttgtgaatttcttttgccaaaaaggatttctggacgaagcaattgaactcgttgagcaaatgatggaacatggttgcacacccaacctgatcacatataatacattatttgatgggattaccaaggattgcagttcagaagatgccctggagttgttgcatggcttggtcagcaagggagtatcgccagatgtcattacattttcttcaatcattggtatcctctcaaaggaagatagagttgaagaggccattcaaatgtttcacttagcgcaagatatcggaatgagacccaaagctttggtgtacaacaagatactgcttgggctatgtaaaagacatgaaatagataatgctatcgactttcttgcctatatggtatccaacggatgcatgcccaatgagtcaacctacattatacttatcgaaggccttgctcgtgaaggtttgttgaaggaggcccaagatctactgagcatgttgtgctcaagaggagttgtaagcaagaacttaatagaagagtag

SEQ ID NO: 232 - DNA, 1401 bp, Zea mays
atggcctccctcacctcggcgtccacttcactcctcttcccgcaggcctcctcatccaggagccgcatccgtctctccacccccctgggcttctccgcgcagcctgcgcggctgcggagccagggggcggcagtgggcgcgcggcggcgcgggcgcctgctggtggtgcgcgcggcgaggggcaagttcgagcgcaccaaaccacacgtcaacataggcaccatcggccatgtcgaccacggaaagaccactctcaccgccgcgctcaccatggtgctcgcctccgtcggtggcagcgcgcctaagaagtacgacgagatcgacgccgcccccgaggagcgcgcccgcggtatcaccatcaacaccgccaccgtcgagtacgagaccgagacccgccactacgcacacgtcgactgccccggccacgccgactatgtcaagaatatgatcaccggcgctgcgcagatggacggtgccatcctcgtcgtatccggtgccgacgggcccatgccgcagaccaaagagcacatcctcctcgccaagcaagtcggtgttcccaagatcgttgtcttcctcaacaagaaggacatggtcgacgacgaggagctgctcgagctcgtcgagctcgaggtccgcgagctgctcagcaactacgagtacgacggcgacgacgtaccaatcgtcgctggctccgccctcaaggcgctcgaggctctcatggtcaaccctgccctgaagcgcggcgacgatgagtgggtcgactacatcttctcgttggttgataaagtggattcctatattccagtcccgcagaggcagactgacctcccgttcttgctcgctgttgaagatgtcttctccatcaccggtcgtggtacagttgccactggccgtatagagcgtggcaccgtcaagattggtgacacagtcgatatcgtcggaatccgggacacccggaactgcacggtcactggtgttgagatgttccagaagaccatggatgatgccatggccggagacaatgttgggctgctgctccgtggtatgcagaaggatgacattgaaagaggcatggtgctggcaaagcctggctctatcacaccgcacaccaagtttgaggctgttgtgtatgtgcttaagaaggaagagggtggccgacactcacctttcttccctggttaccgcccacagttctacatgcggacaactgatgtgacagggagtgtgactacgattatgaatgacaaggatgaggaggcgaagatgtgcatgcctggtgaccgtatcaaaatgattgttcagctcatccagcctgttgcttgtgagcagggtatgaggtttgctatccgtgagggtggtaagaccgttggtgccggtgtcatcaacaaaatcattgagtaa

SEQ ID NO: 233 - DNA, 1992 bp, Agrobacterium tumefaciens
atggatcgggttcgtggatccgcgttcctgctcggcgtcctgctcgcaggatccctgttcgcgttttcagttgctaaggaggagaccaagaagctcggcaccgtgatcggtatcgatctcggaaccacctactcctgtgtgggtgtgtacaagaacggacatgtcgagatcatcgccaatgaccagggtaaccgtatcacaccctcatgggttgccttcaccgatagcgagaggctcatcggtgaggctgccaagaaccaggcagctgtcaaccctgagaggaccatctttgacgtcaagcgtctcatcggaagaaagtttcaggataaggaagtccagagggacatgaaacttgtcccctacaagattattaacaaggatggcaagccatacattcaggtcaagatcaaggatggggagaacaaggtcttcagccctgaggagatcagtgccatgattcttggcaagatgaaggatactgctgaggcgtaccttggcaagaagatcaacgatgctgtcgtcactgtccctgcatacttcaatgatgcgcagaggcaggcaaccaaggatgctggtgtcattgccggcctcaatgttgctaggatcatcaatgagccaactgctgctgctattgcctatggtttggacaagaagggtggcgagaagaacatccttgtctttgaccttggtggtggtacttttgatgtcagtatcttgaccattgataacggtgtgtttgaggtgctggccaccaatggtgacacccatcttggaggtgaggattttgaccagaggatcatggaatacttcatcaagttgatcaagaagaagtacagcaaggacatcggcaaggacaaccgtgctcttggaaagctgaggagggaagctgagcgtgccaagagagcccttagcaaccagcaccaggtccgagttgagatcgagtccctctttgacgggaccgacttctcggagccgctgacccgtgccaggtttgaggagctgaacaacgatctgttccgcaagactatgggccctgtcaagaaggccatggaggacgctggccttgagaagagccagatccacgagatcgtcctggttggtggaagcaccaggattcccaaggtccagcagctcctgaaggactacttcaatggcaaggagcccaacaagggtgtgaaccctgatgaggctgttgcctttggtgccgcggtgcagggaagcatcttgagcggcgagggtggtgacgagacaaaagatatcctcctccttgatgtggctcctctcaccctgggtattgagaccgtcggtggagtcatgaccaagttgatcccgaggaacactgtcatcccgaccaagaagtcgcaggtgttcaccacctaccaggaccagcagaccactgtctccatccaggtctttgagggtgagcgcagcatgaccaaggactgccgtcttctgggcaagttcgacctcaatggcattccgtcagctccgaggggcacaccccagatcgaggtgaccttcgaggtggacgccaacggtatcctgaacgtgaaggcggaggacaagggcacgggcaagtcggagaagatcacgatcacgaacgagaaggggcggctgagccaggaggagatcgaccgcatggtgcgggaggcggaggagttcgcggaggaggacaagaaggtgaaggagcggatcgacgcccgcaaccagctggagacgtacgtgtacaacatgaagaacacggtgggcgacaaggacaagctcgcggacaagctggaggcggaggagaaggagaaggtggaggaggccctcaaggaggcgctcgagtggctggacgacaaccagtccgccgagaaggaggactacgaggagaagctcaaggaggtggaggccgtgtgcaaccccatcgtgtcggccgtataccagcggtcgggcggcgcccccggtggtgatgccgacggcggcgtcgacgacgaccacgacgagctgtag

SEQ ID NO: 234 - DNA, 942 bp, Zea mays
atggagcccatgaacgtagacaacggcggcagcggtggccttgacgcgcagatcgaacagctgatgcagtgccgcccgctcgccgagcaagaggttaaggcactgtgcgagaaggccaaggagatattgatggaggaaagcaacgttcagcctgtcaagagtccagtgacaatatgtggtgatatacatggacaattccacgatcttgtagagcttttccgaattggcgggaagtgtccagacaccaattacttatttatgggagattatgtagatcgtggctactattctgttgagactgtcactatgctagtagcactaaaagtgaggtatccacatcgaattacaatccttcgtggaaaccacgagagtcggcagatcacacaggtgtatggattctacgacgaatgcctacgaaagtatggcaatgcaaatgtatggaagacatttacggatctttttgattattttcctctgacagctctggtggaatctgagattttctgccttcatggtggtctatctccatcaattgaaaatcttgatagtgtgcgcagcttagatcgagtccaagaggttccccatgagggacctatgtgcgatctcttatggtcagatccagacgaccgatgtggttggggcatctcccctcgcggtgctggctacactttcgggcaggacatatcagagcagtttaatcacacaaacaatctcaaactcgtagctcgggctcatcaattagttatggagggatataactgggctcatgagcaaaaggttgtcaccatattcagtgctccaaattactgctatcgatgcggcaatatggcatccattttggaagttgacgactgcaacagccacacattcatccagtttgaaccagcccctaggagaggtgagccagatgtgacgcgaagaacaccggattatttcctttga

SEQ ID NO: 235 - DNA, 852 bp, Zea mays
atggcctattactgcaatgcttgctgcgcagggaagagctgccgcctccgctggttcaaccagctagacccccggatcagcaagcgccccttcagcgacgaggaggaggagcgcctgatggctgcgcaccgcttctacggcaacaagtgggccatgatcgcgcgcctcttccccggccgcacggacaacgccgtgaagaaccactggcacgtcatcatggcgcgcaagtaccgcgagcagtccacggcctaccgccgccgcaagctcaaccaggcagtccagcggaagctcgaggcagcctccgccgcggtcgcaatgccgccgggcgcgggcgcgggagacgtcgccgtcggccagcaccaccacctgctggccgccgccgcggcggcccacgcccacgacgccgcctacagcttcgccgcggacccctacggcttcggcatccgccaccaatactgcaccttcccgttcccgccaggcgccgcttcggctgaggacccgccgccgccaacgcaaatacatcccttctgcttgttccctgggcccagcagcgcggcggcgcacgccgacagcaggcgccttccctggccgccgtcgtcggacgcgcccggcgtcgcccggtacggggagccgcatcagctcctgcagctgcccgttcaaagcggctggatcgacggcgtcggcgtggccgcggccggccaccacgagccgcccttcgtcttgggcaacaacgggggcgcggccgcctttgaagggacgacaagacagcagggctccggcgctcactttgaagctgccgcggcgccgccgccgccagcgttcatagatttcctcggggtcggagccacatga

SEQ ID NO: 236 - DNA, 402 bp, Zea mays
atggggaggcacgctggcggcgtccttctcgctctgacggtggtgctgctgctcgccgccgcgagtggtggcgtcagaccagctgatcctgctgctggggccaataataacggactggcgcatggatcaacggcggcggcggagatggtcgtagctgcgccgtcagctgcacagcagctgcaggggaggagaagcaaggacgacgacggcgtgcttctgcgggaggaggtggtgcgcgcgacggggtcgagcctcccggactgctcgcacgcgtgcggggcgtgctcgccgtgcagccgcgtcatggtcagcttcaagtgctccgcggccgagccgctgccgtgccccatggtgtaccgctgcatgtgcaggggcaagtgctacccggtgccctccagctga

SEQ ID NO: 237 - DNA, 441 bp, Zea mays
atgagcacgacccggccggaggacacccagcaactgatcaacagtgccgccgctagccccaaccgcagcgcaccgtccgccgcgcccagcgatatggagaggggcagcggaaccgccgcgtcctcgtcgcgcgcttcgacgacgtctcactcccaccagagggccacccacagggtggtggaggaggaggaggaggaggagcctagtagcagccgtggcggcggcagcctctgctccgggtacctgtcgctcccggctctgctgctcgtcggcgtcaccgcgtcgctggtgatcctcccgctcgtcctgcccccgctgccgccgccgccgtcgatgctgatgctggtccccgtggcaatgctgctcctgctgctcgtgctggcgttcatgcccacgtcgtccaccggcggccgcggtggaaccggaccgacctacatgtag

SEQ ID NO: 238 - DNA, 441 bp, Zea mays; identical to SEQ ID NO: 237

SEQ ID NO: 239 - DNA, 441 bp, Zea mays; identical to SEQ ID NO: 237

SEQ ID NO: 240 - DNA, 789 bp, Zea mays
atgcccgaccagacgtcggctgcggccgcgggcggcgcggcgttcgaccgttgcctgctggcgctgtacctcatcagcccgctcactgttctggcgctccgcttcatctccgcgccgtacggcaagctatcccggccgggctggggccccgtcctaccggccccactcgcgtggttcctcatggagagccccaccctctggctcccaccgctcgtcctcctccgctggccgccgccgccgctctccggcccactcgccgcactccccgccgcgctctacgcgttccactacgtccaccgcacgctggtccacccgctccgcctcgcccgcctgcgccgcgccccggcccccgtgccgctcctcatcgccgcctgcgccttgggattcaatatcctcaacgcctacctacaggcccgctccttcgccctccacgccggccgccaggcgtcccccttccgctgcctcgctgggctggccctcttcgcgtggggaatgcggacgaacatcgcggcggacaaggagctgctgcggctcaaggaggccggaggcgggtacaagatcccgaggggcgggtggttcgacctcgtcaccagccccaattacttcggcgagacggtggagtggctgggcttcgccgtggtggcgtggacgcccgcggcctgggcgttcttcctctacacctgcgccaacctcgggccgagggccagggaccaccgccgctggtacgtgcagaagttccgcggcgagtacccggcgtcgcgcaaggcgttcatcccctacatctactag

SEQ ID NO: 241 - DNA, 3198 bp, Zea mays
atggcagccggcgagcatgctctggtcgaggagtccaccgtccctgtcgtctccgacgtcgctgacgccgccgccaaaccctacgtccggccggcccttttcctgcgcccccgcgcgggggacggcgcccctgcccctgctccgcccggcgacccgggccccgtcctcccccgcgggatcgaggcggagttcatgggctgggcgggcgtgccccggctgtggccggagtgggtggccaagctccgccggcgccacgagccgctgtggcgggaggtcgggatcctgggcggcatcctcgccagcacgtgccgggtgcgccaccaccaccacgagcgcgtgctgctgcagctcgccgccttctggtacggcgccaccagcaccttcgtcttcccctggggcgaggtcacgctcaccctcgaggacgtcgccacgctcgccggcctgccgctcctcggcgacccagtacgcgcgcccgtgtcggacagcctggagaaggacgtggccgcgatcgaggccgtccgggcggtgatgaaccggagcaagaagaagaaatcttcttacggcgcgtgggttaagcgcttcgtcgagcgcacgccggaggaggagatgccgccgcccgcgaccggtgacggtggcagagacggcgaggcgcaccagctggtcgagcatggcgctttcctctccatgtggctgtcccttttcgttctacccggcccaccgttcgacgtcgtccgccgggagatcattccgctcgcggcccgtctggcgcgcggcgagagcgtggcgctcgcccccgccgcgctcgccaccatctaccacgatctctccgcgctcaaacgccacataacctcgggcgacaaaaacggacccttcgtcatctcggcaccgatccacatcctccagctctgggtctgggagcatttcacccagctccgccctgaaacagtgggctcgtctactcctgatgatcatgacatgccaagggctgcccgatggcgtgaagctggaaaaaggctgagctccaaggacttgcacgcagtgctcatgtcaccgaaggggtttgagtggaggccctataaaaatagcaggttttttggtctgcacccaggtacaggtggttcttgggtccgcggtcaggatatagcaacaagtgaagcgctcttgtcttttgcacggtgtttgcacccttgtgagctcgtgggcatgaactgcattgagcagtataatcctcatcgtgttgcgaggcagctcggcttcgatcaggacatccctgggacggttccccgtgcaagctcaggttgggagaaagcatgggagacatacaacatagaggccaagagttctgcttttatctttccaaatcacaagcctggcgtgacggttcagtatgcaaagtggtggaagccttactcatcagcatgcggtagtgccgttgctaatgctgcaaagatcaaagaaggccacgatcttgttagtccagtgaaaaggaaaatggaaggggttcttgctggaaattctggcaaaaaggtgcgtctgcgtgtggccactgctaccctgggctgcccgcccaatataccagcaggaattaacgtctacccgtcccagtcctcaggcagccatgctgcaacaagacgagctgcggcagcaccagggcttgttctccgcgcgtgtccaccccacctaaggtttaaagctgtgtcccccacagggatgcctcagccactacgagatgcagcctacgatccgcttgatcacgtttctctttctgaaaggctcgatggcattactaagatgcctaagcagcacaacacagaatgtttggtgaaggatagtgagcaggagagaattgtcaaacgtgtgaagattgttacaccaaagcctccaagtgctggcccagagaaggcagttctacacaaagttgttgagcaagctttgcctgacgcagttgcaagctcagctataattcatgactcgtctagtgtatttggtactgaaaggccacatgcaaggtgtctccaacaaagtaaagatgaagatcttaatagtgccaatggggaaaatattagcagaagaacagagcattgtgatgtcgtgcttcttaatgttgtccagggtgcagtgagtactgtaaagagtgaagccattggagctgggactgaagttgatatgcttccaacacatgaagacttattggtggtcagtgacggtgacaggtgtgataaatcaagtagcatgggacatgaggtgcatctggaatctcatatgtcgggagcaaaaatgtcctttataagagagcgaaacgaaggtaccgagctggttgatgcaagaaacgacgaggaagacagccaagttctgaaggaagcgacaaaacaaggcaattttggtgataccgttaaattcaatgacgatgagcttgataaactaacaaggaaggaagccagggtgtttgttgaagcaatgagcaacaaagatgcgccgagtgccatgcatctgaaatgtcctgagatggaaccaacgcggaccatcttacaggagtgtaatgaagaaaagcagatggtcagggaaacaaatgatgagcacgacaacccagtgatgaaagaaggcacggtgcaaaacagttatgaccgtcagcttgcaagtgttctagatggcacgactccaagacaacagccagatgtattaactcatgctgctactgtccaaacctatgatggtctcttaaaagaaccagctaaagaaatggatacatgcattgtcacaggggatatcgacaataccgacaaggtgctcaatgaaaaatttggttctctgaatttcagtgagaagggaaatgaagataccttcgtgtcaaaccaagggttagaatatcctatggaacactcagcaggagccagtagaaagaaatcaggaaacagtgagagattctctagcagtctgttagatggaaatactaaactggttagccatgaagtttgtactaaaacactgtactatcttagtcggtttgaccggatgaaagacgcttgggacaaagatgcaaatagcctaccaaggagggctgttggtacgatggaaatgataggaaaagcatctgcaattcgacatgccgaaattgctgagttggacaaaaagattaatactctgaaggaagagattctggcgctagaggcagctgagaaagggaaatctcctgagtga

SEQ ID NO: 242 - DNA, 1515 bp, Zea mays
atggcgcggctggtgtcgacggcgacgaaggcaatggcggtcgtggtcctcgcggcggcgtcggcagcgctggccgcgcacgactacggtgacgccctccacaagagcatcctcttcttcgaaggccagcggtccggccggctgccaccgaaccagcgcctccggtggcggcaggactcggccatccacgacggcgccgaggcgggggtacggacgggagtggacctgacgggcgggtactacgacgcgggcgacaacgtgaagttcgggttccctatggcgttcacggcgacgctcatgtcgtggggcctgatcgacttcggtcgcagcttcggcgcgcacgaggcggaggcccgggacgcggtgcggtgggcgacggactacctgatgaaggcgacggcgacgccgggggtggtgtacgtgcaggtcggggacgcgtcccgggaccacgcgtgctgggagcggccggaggacatggacaccccgcgcaccgtgtacagggtggacgcggcgcacccggggtcggacgtggccgccgagaccgcggcggcgctggcggccggctccatcgtgttccgcgacgccgacccgggctactcgcgccggctcctgggccgcgccgccgaggtgttcgagttcgcggaccggcaccgcggggcctacagcggcagcctgcgcgccgcggtgtgcccctgctactgcgactacgacgggtaccaggacgagctgctgtggggcgccgcctggctgcacagggcgtcgcgccgccgggagtaccgcgactacatcaagcgcaacgaggtggcgctcggcgccagcgacgccatcaacgagtttggctgggacaacaagcacgccggcatcaacgtcctcatctccaaggaggtcctcatgggcaaggacgagttcttccggtcgttccgggagaacgccgacaacttcatctgcagcctcctgccgggcatctccggccacccacagatccagtactcgccgggtggcctcctcttcaaggtgggcaacagcaacatgcagcacgtgacgtcgctctccttcctgctcctcgtctactccaactacctcagccacgccgacgcccgcgtcccgtgctcctcctcctcctccgccgctgccgcctcgcccgtccagctccgccgcgtcgccaagcgacaggtggactacatcctgggggacaacccgctgcggatgtcctacatggtggggtacggcccgcggtacccgctgcggatccaccaccgggccagctcgctgccgtcggtctcggcccacccggcgcgcatcgggtgcaaggccggggcggcctactacgccagcccggcgccgaaccccaacctgctggtgggcgccgtggtgggcgggcccagcaacagcaccgacgcgttccccgacgcgcgggccgtgttccagcagtccgagcccaccacctacatcaacgcgccgctgctcggcctgctcgcctacttctcccagcaccccgacccagcgcagcactga

SEQ ID NO: 243 - DNA, 2199 bp, Zea mays
atggggcgggttggcctcggcgtggcggcgggttgcgcggccgccacgtgcgcgatcgctgccgcgctggtggcgcgcagggcgtcggcgcgggcgcgctggcgccgggccgtcgcgctgctcagggagttcgaggacggctgcgccacgccgccgccacgcctgcgccaggtcgtcgacgccatggtcgtcgagatgcacgccggcctcgcctccgacggcggcagcaagctcaagatgctgctcaccttcgtcgacgcgctgcccgccggcggcggcgcggtaggacgcacacttccaacttttctagcgcccatcgcggcgcgcattgagcgtcggactagtcgtgtcgatgatgctaagttgaggatccttgcacgctcatctaattgctcttctcgagcagcgctgcgcctgcgcaatgcgccaggttgtattccacaatggcgttgtggcctggggccttctctgtcagacgggaatcattgctcggggaggcaccaccttttgatgagaatagctaaattagtaggcattgagaaaagaaatgaagaaggaacatattattccatcgatctcggaggaacaaactttagagtgttaagagttgaagttggtgctgggtctgtggtcacccgtcggaaggttgaacttcccatccctgaggaattgaccaagggtacaattgaggagctattcaactttgttgccatgactctaaaggaatttgtagaaacagaagatgggaacgatgaacaacgagcgcttggtttcacattttctttcccagttagacaaacatcagtatcttcggggtcattgattaggtggaataaagggtttttgattgaagatgcggttgggaaagatgtggctcaatgcttaaatgaagctcttgctaggaatggactaaatgtgcgagttactgcactggtgaatgacaccgtggggacattagctctaggacattatcacgatgaggatacagtggctgctgtgatcattggtgctggcaccaatgcttgctatattgaacgcactgatgcaattattaaatgtcagggtcttcttacaaactctggtggcatggtagtaaacatggaatggggcagtttctggtcatcacatttgccaagaactccttatgacatctcccttgatgatgagacacaaaaccgcaatgatcaggggtttgagaaaatggtctctgggatttatcttggggaaattgcaaggctggtgctgcatcgaatggctctagaatcagatttttttggtgacgctgctgataatctatgtacccccttcacattgagcacaccactcctcgctgcaattcgcaaggacgattcaccagatctgagcgaagtcaggaagatactgcaagaacatctgaagataccggacactcctctgaaaactcgaaggctggttgtcaaagtgtgcgacatcgtcacccggagagctgcccgcctagccgccgctggtattgtcgggatactgaaaaagctcggccgtgatgggagcggtgttgcttcaagcgggagaacgggagggcagatgaggcggacggtggttgccatcgagggtgggctgtacgagggctacccggtgttcagggagtacctagacgaagccctggtggagatcttgggggaggaggtggcgcggacggtggcgctgagggtgacagtggatgggtctggggccggcgctgccctccttgccgccgtacattcgtcgaatagacagcaagttcacagagagtaccaagctgtcatgggctgggctgacagaggacagggatccttcagtaataagaagcccgatatgagaacagcacataccataacggaagtacgttcgtgggccacgagccacaaaggccgaaagcgtgcgccattcgaaaaacgcgacggtttcttccagaaggctccgaggctccaaccacacgtcggttcctccgactccgcgcgcgtctcccgccgttccgccggcaccgtacacgatggctctccaattcgattaatcggctctgtggctgtcggatcaagtttcgcttgtacagttacgacaaggattacacggattgtgcgacgaatgatgcacgggaggaggatagtacggtacaaacaaggcactcctgagtgggatgagatgctagttacaagtgaaataacaggcagtgttatttgttaa

SEQ ID NO: 244 - DNA, 1251 bp, Zea mays
atgtcgtggttcgggcaccaccaccacaaccagccggctcccccggcgtcgggccccaaccaggtgttcaagatcttctgccgcgccaacgagaactactgcctggccgtccgcgacggcgccgtcgtgctggccccggtcaaccccaaggacgaccaccagcactggtacaaggacatgcgcttcagcacccgggtcaaggacgaggaaggcatgccggcgttcgcgctcgtcaacaaggccacggggctcgcaatcaagcactccctcggccagtcccacccggtgagctacaactacttctgctgctgcctgctgcgtccgtgccttctcttcgtcgccaactctccctcatcatcaagcactccctcggcatgcaggtcaagctcgcgcctttcagcccggaccaggaggacgcgtcggtgctgtggacggagagcaaggacgtgggcaagggcttccgctgcatccgcatggtcaacaacacccgcctcaacttcgacgccttccacggcgacaaggaccacggcggcgtgcacgacggcaccgccgtcgtgctctgggagtggtgcaagggcgagaaccagagctggaagatcctgccgtggggtcccgaggccaactcctccgcggcccacgcgggaggcccgcacgccgtgcgcgtcttctgcaaggccggcggcgaggactacagcctcacggtgcgcaacggcacggcgtgcctggcgcccaccaacccgcgggacgagtaccagcactgggtcaaggacatgcgccacagcacccgggtgcgggacgaggagggctacccggccttcgcgctcgtcaacaaggtcaccggcgaggcgctcaagcactccacggggcagggccaccccgtcaagctcgtgccctacaacccggactaccaggacgagtccgtgctctggaccgagagccgcgacgtcggcaacggcttccgctgcgtccgcatggtcaacaacatctacctcaacttcgacgccttccacggcgacaaggcccacggcggcgtccatgacggtaccgagatcgtgctctggaagtggtgcgagggcgacaaccagcgctggaagatcctcccttggtgaacgaacgaaagaaactactagctggtaccctaataataattctgctggctgcggcgatcccaaaataaaagaggccgggtgcgatgcatctcggacttctcgagtggtgtttgcgtcagacagccagccactgtggggctag

SEQ ID NO: 245 - DNA, 537 bp, Zea mays
ctttctttagaatgggggatttttagaggaaaaaacaaacagggttcagcaatccaggaccaggactataacagtttttggcaaagggaggcagcaagcttgagacaacaactgcacaacttgcaagaaaattatcggcagttgacgggagatgatctttctgggctgaatgtcaaagaactgcagtccctggagaatcaattggaaacaagcctgcgtggtgtccgcgcaaagaaggaccatctcttgatagatgagattcacgatttgaatcgaaaggcaagtttatttcaccaagaaaatacagacttgtacaataagatcaacctgattcgccaagaaaatgatgagttacataaaaagatatatgagactgaaggaccaagtggagttaatcgggagtcaccgactccattcaactttgcagtagtagaaaccagagatgttcctgtgcaacttgaactcagcacactgccacagcaaaataacattgagccatctactgctcctaagctaggattgcaattaattccatga

SEQ ID NO: 246 - DNA, 768 bp, Zea mays
atgaagattttcagttgggtagccaacaagatcggcgggaagcaagaaccgaagcgatctgccgcgcattatcgtggcaacgtatcagaatgtcgcaacgacgagttcagtgattggccccaatcattgctggcaatcgggacgtttgggaacaggcagctggaggaaggggtggtggagacgtcttctgggaacgtccaggccgcgcaagaccccgccaagttcacagaggaagaagaggcggacagcatacggagagaactcgaggtgctgctgctgcaaggcaataataataatggcggccaagcagaggcgcagggctctcgtggagacgaacgacgacaggtagcttggaaagagcatgacggtgaatgtagcaaggagaagcagccgacgagcggggagatggtcacgagcaaggcgagagcgagagaaatggtagcagggaagaaaaggagcacgctgaagccaaggtcggtggcctcgctccttagactgctcgcgtgcaagggcggctttgccaccccggttctggaaccgaggagccctttcccccagtcgagaatggagaagctgctcaaggcgatactggagaagaagatacacccgcagaaccccagcacggctgcagcgaggcggcaccagctggactggaagctagacgagaaagagatcgacgagtgccttgacgacgcgctgcgtgacctcgacgacgacggcgccaagtgggtcaaaactgactcggactttattgtgctcgaaatgtaa

SEQ ID NO: 247 - DNA, 768 bp, Zea mays; identical to SEQ ID NO: 246

SEQ ID NO: 248 - DNA, 969 bp, Zea mays
atgcagttggatctgaacgtggccgaggcgccgccgccggtggagatggaggcgagcgactcggggtcgtcggtgctgaacgcgtcggaagcggcgtcggcgggcggcgcgcccgcgccggcggaggagggatctagctcaacgccggccgtgctggagttcagcatcctcatccggagcgatagcgacgcggccggcgcggacgaggacgaggacgccacgccatcgcctcctcctcgccaccgccaccagcaccagcagcagctcgtgacccgcgagctgttcccggccggcgccggtccgccggccccgacgccgcggcattgggccgagctcggcttcttccgcgccgacctgcagcagcaacaggcgccgggccccaggatcgtgccgcacccacacgccgcgccgccgccggccaagaagagccgccgcggcccgcgctcccgcagctcgcagtaccgcggcgtcaccttctaccgccgcacaggccgctgggagtcccacatctgggattgcggcaagcaggtgtacctagtggtggtccggctgctggccgatatacgcaggtggattcgacaccgctcacgccgctgcaagggcgtacgaccgggcggcgatcaagttccgcggcgtcgacgccgacatcaacttcaacctcagcgactacgaggacgacatgaagcagatggggagcctgtccaaggaggagttcgtgcacgtcctgcgccgtcagagcaccggcttctcgagaggcagctccaggtacagaggcgtcaccctgcacaagtgcggccgctgggaggcgcgcatggggcagttcctcggcaagaagtacatataccttgggctattcgacagcgaagtagaggctgcaagagcctacgacaaggccgccatcaaatgcaatggcagagaggccgtgacgaacttcgagccgagcacgtatcacggggagctgccgactga

SEQ ID NO: 249 - DNA, 1356 bp, Zea mays
atgggaaacggcggtgggactggcgataagacgaagacgaaggcgacaggagggctcaccggtcgcgaatcctcctcctccagccacgcctcgaaacggcgtcggggcctgcgcggcgagtccatggctgatcgcttcattcccaatgactttcctgacttcgtcgccgaggctgaggcctccgacggcgaggggcaccgccccgcagggcatcggggcctgctctcgcttccgtacaccaggctctccgaccacttcgtccgcgccgcgcgccgcctcaaggacaaggtggttgaggagacgtgggtgaaagccggacggaaggtgacggactacacgctctacacgggctctctcgggacagcgctgctgctgttcaagtccttccaggtcactggagaccgcggggacctcgccctcgccgctgatatcgtccgcgcgtgcgatgatgcatcgcggggcctgccgcgcaggttcttgacattcatatgcgggagggcgggtgtctgcgctcttggggcggtgattgccaagcattgcgatgatcagctgagggtcactcagtatctgagctcctttgatgagataacaatcaccgagaaagttccaaatgagttgctgtatggaagggcaggctatctgtgggcttgtttgttcttgaataagcatctcagcgagaagacgatccctctcgatcacattaattctgtggcgaaggacattattaatgagggaagaggttttgcaagcaaggggagtagccctctgatgtacgaatggcatgggaagaaatactggggggctgcgcatggtcttgctggaatcatgcacgtgctaatgcacaccgaactgaaaccagatgagcaggatgatgtaaagaacaccctgcggtatatgatcaagaacaagtttcctagtggcaattatccctcaagtgaaggcaatgaatcagatcacttggtgcactggtgtcatggtgccccaggtgttgctcttacccttgctaaagcatatgaggtcttccatgatgattatttcgagcaatcagctgcagaggctgctgaggttgtctggaaccgagggcttctgaagagagtcggaatatgccacggtgtaagcgggaatgcctatgcgtttctctcactctacaggctaaccggtaatgttgagtacctctaccgggcaaaggcttttgcctgctttcttctggagaaagctgatcagttgatagccgagggggccatgcatggtggtgatcgcccgttttcactgtttgaagggaaagctgggatgtcatacctcctcttggacatggttgatccatctgaatcaaggttccctgcgtatgaactttga

SEQ ID NO: 250 - DNA, 2985 bp, Zea mays
atgcctgtgcgcagctcagtggccatgacgacgacggccgcccgtgctctcgccgccctcgtgctcgtcaccgccgccgccgccgccgccgccgtcgccgacgatggggcggcgctggtggagatcaagaagtccttccgcaacgtcggcaacgtactgtacgattgggccggcgacgactactgctcctggcgcggcgtcctgtgcgacaacgtcacgttcgccgtcgccgcgctcaacctctctggcctcaaccttgagggtgagatctctccagccgtcggcagcctcaagagcctcgtctccatcgacctcaagtcaaatggcctatccgggcagatccctgatgagattggcgattgttcatcacttaggacgctggacttttcattcaacaacttggacggcgacataccattttcaatatcaaagctgaagcacctggagaacttgatattgaagaacaaccagctgattggtgcgatcccctcaacattgtcacagctcccaaatttgaagattctggacttggcacaaaacaaactgactggggagataccgaggcttatctattggaacgaggttcttcaatacttgggtttgcggggaaatcatttagaaggaagcctctctcctgatatgtgccagcttactggcctttggtactttgatgtgaagaacaatagtttgactggggcgataccagacaccattgggaactgtacaagttttcaggtcttggatttgtcttacaaccgctttactggaccaatcccattcaacattggtttcctacaagtggctacactatccttgcaagggaacaagttcactggcccaattccttcagtaattggccttatgcaggctctcgctgtcctagatctgagttacaaccaattatctggtcctataccatctatactaggcaacttgacatacactgagaagctgtacatgcaaggcaacaggttaactggatcgataccaccagagctaggaaatatgtcaacacttcattacctagaactgaatgataatcaacttactgggtcaattccaccagagcttggaaggctaacaggcttgtttgacctgaaccttgcgaataaccaccttgaaggaccaattcctgacaacctaagttcatgtgtgaatctcaatagcttcaatgcttatggcaacaagttaaatggaaccattcctcgttcgctgcggaaacttgaaagcatgacctatttaaatctttcatcaaatttcataagtggctctattcctattgagctatcaaggatcaacaatttggacacgttggacttatcctgtaacatgatgacgggtccaattccatcatccattggcaacctagagcatctattgaggcttaacttgagcaagaatgatctagttggattcatccctgcggagtttggtaatttgagaagtgtcatggagattgatttatcctataatcatcttggtggtctgattcctcaagaacttggaatgctgcaaaacctgatgttgctaaaactggaaaacaacaatataactggcgatgtctcttctctgatgaactgcttcagcctcaatatcttaaatgtgtcatacaataatttggctggtgctgtccctactgacaacaacttcacacggttttcacatgacagctttttaggtaatcctggactctgtggatattggcttggttcttcatgtcgttccactggccaccgagacaaaccgccaatctcaaaggctgccataattggtgttgctgtgggtggacttgttatcctcctgatgatcttagtagctgtatgcaggccacaccatccacctgcttttaaagatgccactgtaagcaagccagtgagcaatggtccacccaagctggtgatccttcatatgaacatggctcttcatgtctttgatgatataatgaggatgactgagaacttgagtgagaaatacatcattggatacggggcatcaagtacagtttataaatgtgttctaaagaattgcaaaccagtggcaataaaaaagctgtatgcccactaccctcagagccttaaggaatttgaaactgagctcgagactgttggtagcatcaaacaccggaatctagtcagccttcaagggtactcgttgtcacctgttgggaacctcctcttttatgattatatggagagtggcagcttatgggatgttttacatgaaggctcatccaagaagaacaaacttgactgggtgactcgcctacggatcgctcttggtgcagctcaaggcctcgcttaccttcaccatgactgcagcccacgaataattcaccgggacgtaaaatcaaagaatatactcctcgacaaagattatgaggcccatcttacagacttcggcatcgctaagagcttatgtgtctcgaagactcacacgtcaacctacgtcatgggcactattggttacattgatcccgagtacgcccgcacctcccgcctcaacgagaagtctgatgtctacagctacggcatcgttctgctggagctgctgaccggcaagaagccagtggacaacgagtgcaatctccatcacttgatcctatcgaagacggcgagcaacgaggtcatggagacggtggaccccgacgtgggagacacctgcaaggacctgggcgaggtgaagaagctgttccagctggcgctcctctgcaccaagcggcagccctcggaccggccgacgatgcacgaggtggtgcgcgtccttgactgcctggtgaacccggagccgccgccgcagccgcagcagcagcagcagaaggcgcacgcgcaccaccagctgccgccgcagccgtcgccgccggcctacgtcgacgagtacgtcagcctgcggggcaccggcgccctctcctgcgccaactcgtccagcacctcggacgccgagctgttcctcaagttcggcgaggccatctcgcagaacatggtgtag

SEQ ID NO: 251 - DNA, 954 bp, Zea mays
atgacgcggcggtgctcgcactgcagccacaacgggcacaactcgcggacgtgccccaaccgcggggtcaagatcttcggggtgcgcctcaccgatggctcggccatccgcaagagcgcaagcatggggaacctctccctcctctccgcggggtcaaccagcggcggcgcgtcgcccgccgacgggcccgacctcgccgacggcggcgggggctacgcctccgacgacttcgtccaggggtcgtcctccgccagccgcgagcgtaagaaaggtgttccttggactgaagaagaacaccggaggtttttgctgggattacaaaagcttgggaaaggtgattggcgagggatttctcgtaatttcgtggtctcaagaacacctactcaagtagcaagtcatgctcaaaaatattttatacgtcaatcaaatatgagcagaaggaagagaaggtctagcctttttgacatggtgcctgatgagtccatggaccttccaccccttcctggaagtcaagagccagagacctcagtgttaaatcaaccaccactgcctccccctgtggaggaggaggaggaggtggaatcgatggagtcagatacttctgctgttgcggagagttctgcagcttcagctcttatgcccgagagtttacagcctacctatccgatgattgttccagcttatttctcaccgttcttgcaattctcagttcctttctggccaaatcaggaagatggaggtgatctgcctcaagaaacgcacgagattgtcaagcctgttgcagttcattccaagaatccaattaatgttgatgaacttgtgagcatgtcaaagctaagcataggggagcctggtcaggaaacggtgtctacttctctgtcgttaaatctgctggtgggtcaaaataggcagtcggccttccatgcaaatcctcaaacgagggctcaagcttga

SEQ ID NO: 252 - DNA, 975 bp, Zea mays
atgatgctgagcgggcacggcggcgggaggcgcctgttcacggcgtcgcagtggcaggagctcgagcaccaggcgctcatcttcaagtacatggcctcgggcgcgcccgtgccgcacgacctcgtcctaccgctccgcctcgccaccggcgtcgacaccgcgccctccctcgccttcccgccgcagccttcgccgtcgctggcgtactggggctgctacggcgcgggggcgccgttcggccgcaaggcggcggaggacacggagccggggcggtgccggcggacggacggcaagaagtggcggtgctccagggaggcccacggcgactccaagtactgcgagaagcacattcaccgcgggaagagccgttcaagaaagcctgtggaagtgacctcctcccccgccgccggccccgctgcggcgtaccgaccgtccgcgatctccaccatctcgccgccccgcgcggccgacgcgccgccgccgagcctcgcctacccgcagcagcatctcctccacggcgcctcctccgcagcaggagcagcagcccgcgtccccgctggcgctctccagctccacctcgacgcgagcctgcacgcggcggcggcggcggcgtcgccatcgccgccgccgtcctaccacaggtacgcccactacacaccgccagcgtcgtcgctcttcccgggcggcggctacggctacgactacgactacgggcagtccaaggagctcaggcgacggcacttccacgcgctcggggccgacctgagcctcgacaagccgctgcccgagcccgacaccggctccgacgagaagcagcccctgcggcgtttcttcgacgagtggccgcgggagagcggcgacatggccgcggacgacgcgacgcagctttccatctccatccccgcggcttcgccctccgacctcgctgctacctccgcctccgccgccgccgcgcgattccacaacggggagtga

SEQ ID NO: 253 - DNA, 891 bp, Zea mays
atggggctgcgcgacatcgagctgacgctgccgccggggttccggttctaccccagcgacgaggagctggtgtgccactacctgcacggcaaggtggccaacgagcggctcgccggcgccggcgcggccatggtggaggtggatctgcacacccacgagccgtgggagctccctgacgtggcgaagctgagcacgaacgagtggtacttcttcagcttccgcgaccgcaagtacgccacggggctgcgcaccaaccgcgccaccaagtccggctactggaaggccaccggcaaggaccgcgtgatccacaccccctgcagcaggcccgccgccggcggcggccaccaccgcgccgtcgtcggcatgcgcaagaccctcgtcttctaccgcggccgcgcccccaacggcgtcaagaccagctgggtgatgcacgagttccggatggagaacccccacaccccgcccaaggaggattgggtcctgtgcagggtcttctacaagaagaaggcagacgccatggactatgctgactgcagcgaccaggacgccatcgccgtgcatgtgcctcgcggcagcgctgacccgggctactgctactcgcctcctccgttccccgcgctcggcggcagccaccaccacggcggctccctcaacgacgacttccacggcggcatggcgctgcttcagcagcagcagcacaacggcgttttcgacttccacggcggccagcctcaccctcacggcggcggcggcggcctccttgccgggccgccggctacagccgtggggtcaagagacggcggcgatcagtgtggcagcggcgtgctcatggacctaggactcgacgaccactacgcctacaacagctacaacagcctgctgcagatgtga

SEQ ID NO: 254 - DNA, 1071 bp, Zea mays
atggcctgcctcaccgacctcgtcaacctcaacctctcggacaacaccgagaagatcatcgcggaatacatatggatcggtggatctggcatggatctcaggagcaaagcaaggaccctctccggcccggtgaccgatcccagcaagctgcccaagtggaactacgacggctccagcacgggccaggcccccggcgaggacagcgaggtcatcctgtacccgcaggccatcttcaaggacccattcaggaggggcaacaacatccttgtgatgtgcgattgctacaccccagccggcgagccaatccccaccaacaagaggtacaacgccgccaagatcttcagcagccctgaggtcgccgccgaggagccgtggtatggtattgagcaggagtacaccctcctccagaaggacaccaactggccccttgggtggcccatcggtggcttccccggccctcagggtccttactactgtggaatcggcgccgaaaagtcgttcggccgcgacatcgtggacgcccactacaaggcctgcttgtatgcgggcatcaacatcagtggcatcaacggggaggtgatgccagggcagtgggagttccaagtcgggccttccgtgggtatttcttcaggcgaccaggtctgggtcgctcgctacattcttgagaggatcacggagatcgccggtgtggtggtgacgttcgacccgaagccgatcccgggcgactggaacggcgccggcgcgcacaccaactacagcacggagtcgatgaggaaggagggcgggtacgaggtgatcaaggcggccatcgagaagctgaagctgcggcacagggagcacatcgcggcctacggcgagggcaacgagcgccggctcaccggcaggcacgagaccgccgacatcaacacgttcagctggggcgtggccaaccgcggcgcgtcggtgcgcgtgggccgggagacggagcagaacggcaagggctacttcgaggaccgccgcccggcgtccaacatggacccctacgtggtcacctccatgatcgccgagaccaccatcatctggaagccctga

SEQ ID NO: 255 - DNA, 3207 bp, Zea mays
atggccgggaacgagtggatcaatgggtacctggaggcgatcctcgacagccacacctcgtcgcggggtgccggcggcggcggcggcggcggggaccccaggtcgccgacgaaggcggcgagcccccgcggcgcgcacatgaacttcaacccctctcactacttcgtcgaggaggtggtcaagggcgtcgacgagagcgacctccaccggacgtggatcaaggtcgtcgccacccgcaacgcccgcgagcgcagcaccaggctcgagaacatgtgctggcggatctggcacctcgcgcgcaagaagaagcagctggagctggagggcatccagagaatctcggcaagaaggaaggaacaggagcaggtgcgtcgtgaggcgacggaggacctggccgaggatctgtcagaaggcgagaagggagacaccatcggcgagcttgcgccggttgagacgaccaagaagaagttccagaggaacttctctgaccttaccgtctggtctgacgacaataaggagaagaagctttacattgtgctcatcagcgtgcatggtcttgttcgtggagaaaacatggaactaggtcgtgattctgatacaggtggccaggtgaaatatgtggtcgaacttgcaagagcgatgtcaatgatgcctggagtgtacagggtggacctcttcactcgtcaagtgtcatctcctgacgtggactggagctacggtgagccaaccgagatgttatgcgccggttccaatgatggagaggggatgggtgagagtggcggagcctacattgtgcgcataccgtgtgggccgcgggataaatacctcaagaaggaagcgttgtggccttacctccaagagtttgtcgatggagcccttgcgcatatcctgaacatgtccaaggctctgggagagcaggttggaaatgggaggccagtactgccttacgtgatacatgggcactatgccgatgctggagatgttgctgctctcctttctggtgcgctgaatgtgccaatggtgctcactggccactcacttgggaggaacaagctggaacaactgctgaagcaagggcgcatgtccaaggaggagatcgattcgacatacaagatcatgaggcgtatcgagggtgaggagctggccctggatgcgtcagagcttgtaatcacgagcacaaggcaggagattgatgagcagtggggattgtacgatggatttgatgtcaagcttgagaaagtgctgagggcacgggcgaggcgcggggttagctgccatggtcgttacatgcctaggatggtggtgattcctccgggaatggatttcagcaatgttgtagttcatgaagacattgatggggatggtgacgtcaaagatgatatcgttggtttggagggtgcctcacccaagtcaatgcccccaatttgggccgaagtgatgcggttcctgaccaaccctcacaagccgatgatcctggcgttatcaagaccagacccgaagaagaacatcactaccctcgtcaaagcgtttggagagtgtcgtccactcagggaacttgcaaaccttactctgatcatgggtaacagagatgacatcgacgacatgtctgctggcaatgccagtgtcctcaccacagttctgaagctgattgacaagtatgatctgtacggaagcgtggcgttccctaagcatcacaatcaggctgacgtcccggagatctatcgcctcgcggccaaaatgaagggcgtcttcatcaaccctgctctcgttgagccgtttggtctcaccctgatcgaggctgcggcacacggactcccgatagtcgctaccaagaatggtggtccggtcgacattacaaatgcattaaacaacggactgctcgttgacccacacgaccagaacgccatcgctgatgcactgctgaagcttgtggcagacaagaacctgtggcaggaatgccggagaaacgggctgcgcaacatccacctctactcatggccggagcactgccgcacttacctcaccagggtggccgggtgccggttaaggaacccgaggtggctgaaggacacaccagcagatgccggagccgatgaggaggagttcctggaggattccatggacgctcaggacctgtcactccgtctgtccatcgacggtgagaagagctcgctgaacactaacgatccactgtggttcgacccccaggatcaagtgcagaagatcatgaacaacatcaagcagtcgtcagcgcttcctccgtccatgtcctcagtcgcagccgagggcacaggcagcaccatgaacaaatacccactcctgcgccggcgccggcgcttgttcgtcatagctgtggactgctaccaggacgatggccgtgctagcaagaagatgctgcaggtgatccaggaagttttcagagcagtccgatcggactcccagatgttcaagatctcagggttcacgctgtcgactgccatgccgttgtccgagacactccagcttctgcagctcggcaagatcccagcgaccgacttcgacgccctcatctgtggcagcggcagcgaggtgtactatcctggcacggcgaactgcatggacgctgaaggaaagctgcgcccagatcaggactatctgatgcacatcagccaccgctggtcccatgacggcgcgaggcagaccatagcgaagctcatgggcgctcaggacggttcaggcgacgctgtcgagcaggacgtggcgtccagtaatgcacactgtgtcgcgttcctcatcaaagacccccaaaaggtgaaaacggtcgatgagatgagggagcggctgaggatgcgtggtctccgctgccacatcatgtactgcaggaactcgacaaggcttcaggttgtccctctgctagcatcaaggtcacaggcactcaggtatctttccgtgcgctggggcgtatctgtggggaacatgtatctgatcaccggggaacatggcgacaccgatctagaggagatgctatccgggctacacaagaccgtgatcgtccgtggcgtcaccgagaagggttcggaagcactggtgaggagcccaggaagctacaagagggacgatgtcgtcccgtctgagacccccttggctgcgtacacgactggtgagctgaaggccgacgagatcatgcgggctctgaagcaagtctccaagacttccagcggcatgtga

SEQ ID NO: 256 - DNA, 2685 bp, Zea mays
atggcttcgtcctcgaaggcctccgattcctcccaacgatccaagcggtcggatcaggggatgggcaaggacgccgctgccgcctctgttgtcccgatccacgcgaacctgacgcagctgatacggcaagtccaatcggggcgcctcgcgtacatcaaggagaaattggaggtgaacaggaaaacgctgcagaggcactcctgctcgctgttcgacgtggcagcggcggcggaggtggcgtcgaggggcaccgatggcggcaacgcgctgtcacagcgcgcggcggagagacagtgtgggtcagacctggcaaacgggataggggagagggacgtggtttccgttcaggaggagaacctggctaccggtacgctcgcgctctccagctcgggcgctaccgcgcagcggacaattgtgcggttcgtgaagctgccgctggttgagaagatccctccgtacaccacttggatcttcctggacaaaaaccaaagaatggctgacgatcagtcagttgttggtaggagaaggatatactatgatacagttggaaacgaggctctgatctgcagtgacagtgatgaagaaattccagaaccagaggaagagaaacactttttcacaaagggagaagatcatttgatatggagagctactcaagaccatgggttaaaccaagaggttgttaatgtcctttgccagtttattggtgcaaccccatcagaaattgaggaaagatctgaagtcctatttgagaaaaatgagaagcactcaggatcttcagataagatagagagccgactttctcttgacaaaactatggatgccgttctggattcttttgataatctcttctgccgcagatgcttggtttttgattgccgccttcatggttgttcacagaatttggtatttccatgtgagaagcaaccctacagctttgaccctgatgaaaacaagaagccatgtggtcatttgtgctaccttcgatttccccagtggagagaaggatttaaagagatgcatgatgatggtcttgctggtggtgcaacatatactatggaatcgggaactgcctcacagagagttgatgttaatgttatgtatgaatcagaagattcaaaccgacagaaaggcaacattaggtccatgacactagttggaaccagtggatcaaaaataatttcttctgtcagtgcggaagaaagcactactactccttcagcagatatctctgaaacagagaatgtatcctctgatttgcctcccagtagtttaaggaaacacaagatttcaaaacatggacctaggtacagggagcattctcctggcaaaaggcagaaggttttcacttctgacatttcttttgaaggcaatataatgaataaactttccattccggagattcgtgacacaagactagagtccagagaatctggtggtgataaactacgaattcttgacgagtccactaagaagacttcaaggaaagatatgtgtggggaaagcccagctactaccatggaaaatgtgggaagacagagtaataaagtgtcttcaacaaagaatttcttggagtccactctttcttgttggagtgccttagagcgagatctatacttgaagggcatagagatatttggaaagaacagctgtctcatcgccagaaacttactatctggtcttaagacctgcatagaagtggcaaactacatgtataacaatggtgcagcgatggcgaagagacctctcttgaataaatccatctcaggcgactttgcagaaaatgaacaagactacatggagcaagacatggctgccagaacaagaatctatcgtcggaggggccgcaatcgaaagctgaaatatacttggaaatctgcagggcatccaactgttagaaaaagaactgatgacgggaagcaatgttacacacaatatagcccatgtgcgtgccagcaaatgtgtggtaaagattgcccctgtgcggacaagggaacttgctgtgagaagtactgtgggtgttcgaagagctgcaaaaacaagtttagaggctgtcattgtgcaaaaagccaatgcagaagcagacagtgcccctgttttgcagccagtcgtgaatgtgatccagatgtttgtaggaattgctgggtgagctgtggagatggttcactaggtgagccacttgcaagaggtgatggttatcagtgtggaaatatgaagctccttttgaaacaacagcaaaggattttgttaggaagatctgatgttgcaggttggggtgcattcattaagaatcctgtaaataaaaatgattatcttggagaatatactggtgaattgatctctcacaaggaagcagacaaacgcggcaaaatttatgaccgggcaaactcatcttttctgttcgatttaaatgaccagtatgtgttggatgcttatcgcaagggggacaaattgaagttcgcaaatcactcatctaaccccaactgctatgcaaaggtgatgctggtggctggcgaccatcgggttggtatatatgcgaaggagcatattgaggctagcgaggaactcttttatgattatcgttatggacctgaccaggctccagcttgggctaggagacccgaaggatcaaagaaggacgaggcatccgtctctcaccgtcgagcacacaaagtggctcgatag

SEQ ID NO: 257 - DNA, 822 bp, Zea mays
atggacgacgacgacgactccccgcctcatgagtcggcggcggcggcggcggcagacctatcgctgacactggcgccggcgccggcgctggcgcctcccgcgccgcctccggcgctgcccgccgtcgcctccgacggaggcgtggcgacggcgcgcgtggacggcaaggacgtgcgcctgttcccgtgcctcttctgcaacaagaagttcctcaagtcgcaggcgctcgggggccaccagaacgcgcacaagaaggagcggagcgtcggctggaacccctacttctacatgaccccgccgcacccgcagcccaatgcggcgccggcgagccccaccgccccgccgcccgcctacgcggcgggcggcctcctccccgcgccgtacgcggcccacgtgtacgcccccgtgccggcggcgccgccgccgccgtcgttccccatcgcctcgcacggctccagcggggggctgcggtactacgcgccgccccacgaggcggcggcggcggcggcggcggacgcggggacgggggcgccgacgaccgcgggcgtcgtgcttgccccgcgcgcgcgctacgccacggccacgcaccagcagcaggcccagcagcccggcggcggcggccgcgatgacttgatcgacttgctcaactggaggaggggatcccacggcgcaccggccgccgccgccgccaccgcctcgccggccagcaccaccaccactctcaccacctcatacgccggcgcccccgacggcggcaccagcaccaacgacgacgacgacgctgacgacgccggggagctcgacctcaacctcagcctctag

SEQ ID NO: 258 - DNA, 1705 bp, Zea mays
gatatgtaaactggtcttttattcacccttgagctacgccttctgtgtcctgaagttacgtgacaggttttcaacaacaattgatcgggaggtctaaattaccatacccgatcgttattctaccgtgtactaacgttaaaccaaaccatacatgcgatttggcaaaacagaaaaaagaacatatatacacgaaaaaatcgaggacaaatgcgtcctgcttgactagctgcttaccgccgacgcctgctgacgcctgtgcaacgtctctgtgtaatgtcaagctagctactaatgccctttattagtcttgtctaatattttttgtccacttgtttgcagttatgtgagggcacaccctacagccagtcttaccgaacgctcggtgactagctagctggcgtggaccatcggggactgcggcgacagcaacgccaaggggctggggatggcgaggtgcgaagcggtggttgctccccggcgcggcaagctgaggcggaggggccgcgtggccgcccagcgctcggccttggccttgctgtgctggtgctggcgcacgaagcggcggatctacgcgggctccgtcttcgccaagccgggcttcgtgagcatcgccgaggtcatcgagcgcggcgacgccccgggctgcaacagggacctcgtccacatcgcgtacagcctctccaaggacttcggcctcccgggcttccgcgtcggcatcgtctactcctacaacgacgacgtggtggcctgcgcgcgcaagatgtccagcttcggcctcgtctcgtcgcagacgcagcacttcctggcgatgatgctcgccgacgcggagttcatggcacgcttcctcgcggagagcgcgcggcggctggcggcgcgccacgaccgcttcgtcgcgggcctccgcgaggtcggcatcgcgtgcctgccgggcaacgcgggcctcttctcgtggatggacctgcggggcatgctccgggagaggacgcacgacgcggagctggagctgtggcgggtcatcgtacacagggtgaagctcaacgtgtcgcccggcacgtcgttccactgcaacgagcccggctggttccgcgtctgctacgccaacatggacgacgacaccatggaggtcgcgctcgaccggatccgccgcttcgtgcgccagcaccagcacagcaaggccaaggccgagcgctgggcggccacgcggcccctccgcctcagcttgccgcgccggggagcaaccaccgcttcgcacctcgccatccccagccccttggcgttgctgtcgccgcagtccccgatggtccacgccagctagctagtcaccgagcgttcggtaagactggctgtagggtgtgccctcacataactgcaaacaagtggacaaaaaatattagacaagactaataaagggcattagtagctagcttgacattacacagagacgttgcacaggcgtcagcaggcgtcggcggtaagcagctagtcaagcaggacgcatttgtcctcgattttttcgtgtatatatgttcttttttctgttttgccaaatcgcatgtatggtttggtttaacgttagtacacggtagaataacgatcgggtatggtaatttagacctcccgatcaattgttgttgaaaacctgtcacgtaacttcaggacacagaaggcgtagctcaagggtgaataaaagaccagtttacatatc

SEQ ID NO: 259 - DNA, 236 bp, Zea mays
cgcttcctcgcggagagcgcgcggcggctggcggcgcgccacgaccgcttcgtcgcgggcctccgcgaggtcggcatcgcgtgcctgccgggcaacgcgggcctcttctcgtggatggacctgcggggcatgctccgggagaagacgcacgacgcggagctcgagctgtggcgggtcatcgtacacagggtgaagctcaacgtgtcgcccggcacgtcgttccactgcaacgagcc

SEQ ID NO: 260 - DNA, 1527 bp, Pichia angusta
atgcaactgtctaccttatgggaaccgccaatagtgaatccaagaaacctgaaagcgacctcaataccaatttttaacctatggaacgtctatggaagaaacttctttttcgggtggtttggtttttttgtttgttttctttcttggttcgcgtttccgcctcttctccatggcatgttgaagaaggacctaagactcactgcagtggatatatccaataataacatatgtggactgacaggaactttactaggcagattcattttggggccccttaacgacaagtatggcccacggattactttgacaggcgtgctggttgcaggagcaattccgactgcatttgttcctttggttacaaatgttgcaggtctacatgccattcgcttttttatcagctttctaggctcctcgtttatttgttgctcccaattctgcgctgtattttttgataacaacattatagggacagcaaatgccatttctgccggttggggaaatgctggaggaggtgtggcattctttgtcatgcctgccatctcaaatgcgttggaaaatagaggttactctttgcaccattcttggagctactcttttgtgattgggccgttcttaattttgatgatcacggcaatactgatctttgtatttggaagcgactgcccgagaggcagatggtcccttcgtggagatatccttggtattaacatggataatatgctcgtgaagtctgtctctgtcacaaggcacttctctaaggaaggagagctcacttctgtatttgttgagcctgttaacgcaattgataaggtcgtggttgagcccaatcaagaccaggaaattcttgaagtcgcagatatcataaatggtgacgaaatcattgaagacccatcgctcaatgacgtggtcaagatctgtttatccccgcggacaatgctggtcggactttgctacatgtgctcgtttggtactgagcttgcagtagagtctattatttccaacctgttcgggcaaaagatgacaaactggagcacctctaaagctggagcatggggctcaatgcttggactcctgaacgtggtggcaagaccagctggagggatcatctccgattttttataccaaagattcaaaaccacaaaggctaaaaagttctggatgatcttcactggcctgatgcagggcatttttttgatttggattggactagttccggaattatccatcgcgggactcatagtgtccgtttcgtttttgtgtctttggtttgagatgggtaatggtgcaaattatgcatgtgttcccgttgtgaatagacatcacagtggtattgtgagtggagttacgggagcaatgggtaacttaggaggcattttgtttagtttagtgttcaggtacactatatcaaatggagtgaacaactacttcaaggcgttttggattataggaattgtttgcactgctgtaaatctggtctgtgtgcttattccaattagagaggagaggccaaggaaagcggaaaattga

SEQ ID NO: 261 - DNA, 1050 bp, Diplodia maydis
atgtcctctactaccgtcaaactcccggagcccttcgcctccatcccccggtccagcctcacattcgggccatcaccaatccaggcgcttcccaagatctcacaagccctcggcgggaaagtaaacgtctacgccaagcgtgaagatgtgaactcgggcctggcatacggcggtaacaaggtccgcaagctcgagtacctcgtcccacaggccatctcgtctggcgccgacacgctcgtctcgatcggcggcgtccagtccaaccacacccgcgccgtcacggccgtcgccgtcgccagcgggctcaaggcggccaccgtgcaggagcactgggtcgactggacggacccgggctacgagaaggtcggcaacctgcagctgagccgcctcatgggcggggacgtccacctcgaccccagcggcttcggcatcgagcacaagaccaccctggccaacctcacaaaggacctcgagagcaagggccagaagccttattacatccctgctggcgcaagtgaccacccctttggcggcctgggcttcgcgaggtgggcgttcgaggtggagcagcaggaggcggagctcggcgtcttcttcgacactatcatcgtgtgtgccgtcacagggagcacgttcgcgggcatgatcgctgggttcaagctggcgcagaagaacgggggcaagcctaggagggtcatcggcatcgacgccagtgccaaggtgcagcagactttcgaccaggtcttgaggattgcaaagtttacagccgtcaagatcggcctgtctgagggtgatatcacagagaaggatgtcgagctggtggataggtatcatgcgggcacgtatggtattccagacgagcagaccatcgaggctatcaagttcggtgctagcacagaggctttcatcacggatcccgtgtatgagggcaagagcttggcgggtatgatggatatgatcaagaagggagagattcctgggggtagcaacgtactgtatgcccacttgggtgggcagctggctctgaacgcatattcgaccatcccctga

SEQ ID NO: 262 - DNA, 597 bp, Artificial
  Fusion Zea mays Clostridium beijerinickii
atggagagcctcatcctcgcctcctcctgctccgcgtccccacggctcccgctactctcctccgccgcccgcttccgcgggctgcccgtttccgtgccgccgccgtcttcggcgtccatcagcggtgccgcgaggaaagggccgatgaggcccaggctcttcgttgccgcggcggcggctcctcgcggctccggaaacgttttcgagggattgagaaccgaactcaaacaggtgtacaaatgcgagatctgcggtaacatcgtcgaggtcgtccacaacgccgggggcacgttggtctgctgcaaccagcccatgaaactcaaggccgaaaatactactgacggagccaccgagaagcacgtccccgtcattgagaaggtcgagggtggcgtcttggtcaaagtcggctctgtcgagcaccctatgttggacaaccactacatcgaatggatcgaaattcacacggagagcaacgtatataaaaagttcctcaagcccggcgagaagcccgaggccttcttcaaggtcgacgaacctgtcctctttgcgagggaatactgcaacctccacggcctctgggccgagaagaacagctag

SEQ ID NO: 263 - DNA, 564 bp, Artificial
  Fusion Zea mays Clostridium beijerinickii
atgctaataataagttcaactcctcatttgggggtgaaggcctggaagatggtggcgtggccagggtcggcgaggtgggcgaagaggttgtcgatggggccggtgccggtgtactcggcctggaaccaggcgcccatgacggcgagcatggcgaggcgtccgttcttgatctccttggtgcgcaccgaactcaaacaggtgtacaaatgcgagatctgcggtaacatcgtcgaggtcgtccacaacgccgggggcacgttggtctgctgcaaccagcccatgaaactcaaggccgaaaatactactgacggagccaccgagaagcacgtccccgtcattgagaaggtcgagggtggcgtcttggtcaaagtcggctctgtcgagcaccctatgttggacaaccactacatcgaatggatcgaaattcacacggagagcaacgtatataaaaagttcctcaagcccggcgagaagcccgaggccttcttcaaggtcgacgaacctgtcctctttgcgagggaatactgcaacctccacggcctctgggccgagaagaacagctag

SEQ ID NO: 264 - DNA, 654 bp, Zea mays
atgtgcgtgcaaaggctccttaggctgaggatggcgtcccgctcgtgttcccgctgtgctgccttggcgccgcacgctgcgctcccgctttcctctctcctcgcaccatcgccatctgccgctcgccctcgatccgcgcccctctcgtgcgcagctcggccgtgcaggggccacgcggcggcgtcagcgttgcacggcgcggcaggtcggaggcccccgagcgtggcggctatgtcgtcgtctacgccgccgcctggctctgtgcaaaagtcggaagaagagtgggaggcaatcctcactcctgagcagttcaatatcctacgcctcaagggaaccgagtaccctggaacgggtgaatacgacaagttctttgaggagggaatttataaatgtgctggatgtggaactcccttatacaaatcatcgacaaagttcaactcagggtgtggctggccggcattttatgaaggacttcctggggccataaggcagacgccggaccctgatgggaggcggacagagatcacctgtactgcttgtggaggacacttgggtcatatattcaaaggggagggttttaaaacgcctaccaatgaacgacactgtgtgaatagcatctcgcttaagttcaatccgtcccccgaggaagcctga

SEQ ID NO: 265 - DNA, 729 bp, Zea mays
atgacggtgccagatgccgagtcgcgcttccatgtcctcgcggtggacgacagcctcgtcgacaggaaactcatcgagatgctgctcaagacctcgtcctaccaagtgaccacggtggattccgggagcaaggcgctggagctgctggggctgagggacgcgtcgtcgccgtctccgtcctcgcctgaccaccaggagatcgacgtgaatctcatcatcactgactactgcatgccaggcatgacaggatacgatctgctcaagagagtgaaggggtcctcctcgctcaaggacattcctgtggtgatcatgtcgtctgagaatgtgcctgcccggatcagcaggtgcttgcaagacggcgcggaggagttcttcctgaagcccgtgaagctggccgacatgaagaagctcaagtcgcacctgctgaaacggaagcagcccaaggaggcgcaggcgcaggcgcaggcgcaggcgcagcagggacaggcggtggagctggagcctgagcagcagctggacccgcgcacgcagccggcgcacgacgcggaggaaaccgcggcagagccgccgccggccgcatccaacggaaccaccgatggcggcaacaagaggaaggcggcagccatggaggaggaggggatgctggccgtgatgacggtggcggcgccggagagcagcaccaagccgaggctgtccaccaccaccagcagcctggcggtggaaacctga

SEQ ID NO: 266 - DNA, 408 bp, Zea mays
atgtcggggtcgaaggtgtacacccttgaggaggtggccaagcacaacaccaaggatgactgctggctcgtcatcggcggcaaggtgtacaatgtgaccaagtttctggaggaccaccctggaggtgatgatgtcctgctgtcttccactgccaaggatgctaccgatgatttcgaagatgtggggcacagcaccaccgcccgtgcaatgatggacgagtacctcgtcggtgagattgatgcggccacgatacccagtaaggtgaagtacacgccccccaagcagccgcactacaaccaggataagaccccggagttcgtcatcaagatcctccagtttttggtccccctggcaatactgggcctggctgttgctgtaaggatctacaccaagtcggaatctgcctag

SEQ ID NO: 267 - DNA, 861 bp, Saccharomyces cerevisiae
atggaaacggatagtggtatacctggtcattcatttgtgttaaagtggacaaaaaacatcttttcgcgcacattgcgtgcatctaactgtgtacctagacatgttgggttcatcatggatgggaacaggagattcgctagaaagaaagagatggacgtaaaggagggccacgaggcaggatttgttagtatgagtagaatcttagaactgtgttatgaagcaggagtcgatacggctaccgtgtttgccttttcaattgaaaatttcaagaggagctcacgggaagttgaatcactgatgactttagcgcgcgaaaggatacgacaaatcacagaacgtggagagctggcctgtaagtatggggtacgcattaaaattatcggcgatctctctttgttggataagtctctattagaagatgttcgggttgctgtggaaactacaaagaacaacaaaagggccacgttaaatatctgctttccatatacaggcagggaagaaatcttgcatgccatgaaagaaacaattgttcaacataagaagggcgccgctatagacgaaagcacgttagaatcgcatctctacacggcgggggtaccccctttagatttattgattaggacaagtggcgtttccagattaagtgactttttgatatggcaggcatcgagtaagggcgtacgcatcgaattgctggattgtttatggccagagtttggacctatacggatggcatggattttattaaaattttcgtttcacaaatcctttttaaacaaagagtacagattagaggaaggtgattatgacgaggaaaccaatggggaccccatcgatttgaaagaaaaaaagttgaattaa

SEQ ID NO: 268 - DNA, 1827 bp, Zea mays
atggccaccgccagcctcgcgctctcgctgcgcctcgcgccgtcctcgcgcccgctgagcctccgccgccggggggccgccggcgtcacctgccgcgccaccaccgccacgttccaccagctcgacgccgtcgcggtgagggaggaggagtccaggttccggacggcggcggcggagggccgcaacctgctgccgctcacgaggtgcatcttctccgatcacctcacgcccgtgctagcgtaccgctgtctcgttaaggaggacgaacgcgatgcgcccagctttctcttcgagtctgtcgagcaggggtccgagggcaccaatgtggggaggtacagcgtggtcggggcgcagccttctatggaggtcgtggccaaggctaaccatgtgacggtcatggaccatgagatgaagtcgaggagggagcacttcgtgcctgatcccatgaggatccccaggacaatcatggagcagtggaacccgcagattgctgacagcctccctgatgcattttgtggaggatgggttggattcttctcatatgatacagtgcgttatgttgaaacaaagaagcttcctttcagtaaggcaccacatgacgataggaaccttcctgacattcatttaggcctctatagtgacgtcattgtgtttgatcatgttgaaaagaaaacacatgttattcattgggtgaggacagactgctatcgttctgttgatgaagcatatgaagatggaagaaatcggcttgaagctttgttatcaagattacattgcctcaatgtcccaacactttcttctggttctataaaactcaatgttgaaaactttggcccagtaatgcaaaaatcaacgatgtcaagcgaagaatataaaaatatcgttgtccaagctaaagaacacatcttggccggtgacattttccaagttgttttaagccagcgttttgagagacggacattcgccgacccctttgaaatctatcgtgcattgcgcatcgtaaatcctagtccatatatggcctatctacaggcacgaggttgtattctcgtggcatcgagtcctgaaattcttacccgggtacaaaagaggacaataatcaatcgtccgcttgctggaaccataagaagaggcaaaacaaaagcagaagacaaaactttagaacaattgcttttgagtgatgaaaagcagtgtgctgaacatattatgctagtagatcttggccgaaatgatgttgggaagaatttgtgccatttatatttcttcattatcttctatatccgtaatattgagaagcttctggatgacaagatactagagtggtcatggcttaaagtgtccaaaccaggttcagtaaaggtagagaaattgatgaatatcgaacgatattctcatgtcatgcacatcagctcaacagtaactggagagctacgcgatgatcttacgtgttgggatgcgctacgagccgcattgccagttggaaccgttagtggcgctccaaaggtgagagcaatggagttgattgatcagctagaagtgagtatgcgtgggccgtatagtggtggttttggagggatttccttccgcggcgacatggacattgcactcgctcttcgcactattgtcttccccaccgcatctaggtttgataccatgtactcgtacacagacagtaagtcccggcaggagtgggtggctcacctccaggccggagctggcatagttgctgatagcaaaccggatgacgagcaccaagagtgtataaacaaggctgcaggtgttgctcgtgccattgaccttgctgaatcgacatttcttgaagagtag

SEQ ID NO: 269 - DNA, 2886 bp, Sorghum bicolor
atggcgtccgagcggcaccactccatcgacgcgcagctccgtgccctcgcacccggcaaggtctccgaggagctcatccagtatgacgccctgctcgtcgaccgcttcctcgacatcctccaggacctccatggccccagccttcgcgaatttgtccaggagtgctacgaggtgtcggccgactacgagggcaagaaagacacgtccaagctgggggagctgggagccaagctgacggggctggcccccgccgacgccatcctggtggcgagctccatcctgcacatgctcaacctcgccaacctggcggaggaagtggagctggcgcaccgccgccggaacagcaagctcaagcacggggacttctccgacgagggctccgccaccaccgagtccgacatcgaggagacgctcaagcgcctcgtgtcgctcggcaagacccccgcggaggtgttcgaggcgctcaagaaccagagcgtcgacctcgtcttcaccgcgcatcccacgcagtccgccaggaggtcgctcctgcagaaaaacgccaggatccggaattgtctgacgcagctgagtgccaaggacgtcacggtcgaagacaagaaggagctcgacgaggctctgcacagagagatccaagcagctttcagaactgatgaaatcaggagagcacaacccaccccacaggatgaaatgcgctatgggatgagctacatccatgaaactgtatggaacggtgtgcctaagtttttgcgccgtgtggatacagccctgaagaatatcggcatcaatgagcgccttccctacgatgttcctctcattaagttctgttcttggatgggtggtgaccgtgatggaaatccaagagttactccggaggtgacaagagatgtgtgcttgctgtctagaatgatggctgcaaacttgtacatcaatcaggtcgaagacctgatgtttgagctctctatgtggcgctgcaatgatgagcttcgtgctcgagccgaagaagtccagagtactccagcttcaaagaaagttaccaagtattacatagaattctggaagcaaattcccccaaacgagccctaccgggtgatccttggtgctgtaagggacaagttatacaacacacgcgagcgtgcacgccatctgctggcaactggattttctgaaatttctgaggacgcggtatttaccaagatcgaagagttccttgagccccttgagctgtgctacaaatccctgtgtgagtgcggcgacaaggccatcgccgacgggagcctcctggacctccttcgccaggtgttcgcgttcggtctctccctggtgaagctggacatccggcaggagtcggagcggcacaccgacgtgatcgacgccatcaccacgcacctcggcatcgggtcgtaccgctcgtggcccgaggacaagcggatggagtggctggtgtcggagctgaaaggcaagcgcccactgctgcccccggaccttcccatgaccgaggagatcgccgacgtcatcggcgccatgcgcgtcctggccgagctcccgatcgacagcttcggcccctacatcatctccatgtgcacggcgccctcggacgtgctcgccgtcgagctcctgcagcgcgagtgtggcattcgccagacgctccccgtggtgccgctgttcgagaggctggccgacctgcaggcggcgccggcgtccgtggagaagctcttctccactgactggtacatcaaccacatcaacggcaagcagcaggtgatggtcggctactccgactccggcaaggacgccggccgcctgtccgcggcgtggcagctgtacgtggcgcaggaggagatggccaaggtggccaagaagtacggcgtgaagctgaccttgttccacggccgcggtggcaccgtcggcaggggcggtggcccgacgcacctcgccatcctgtcccagccgccggacaccatcaacgggtccatccgtgtgacggtgcagggcgaggtcatcgagttcatgttcggggaggagaacctgtgcttccagtctctgcagcggttcacggccgccacgctggagcacggcatgcacccgccggtgtctcccaagcccgagtggcgcaagctcatggaggagatggccgtcgtcgccacggaggagtaccgctccgtcgtcgtcaaggagccgcgattcgtcgagtacttcagatcggctacccctgagactgagtacgggaagatgaacatcggcagcaggccagccaagaggaagccgggcggcggcatcaccaccctgcgtgccatcccctggatcttctcgtggacacagacgaggttccacctccccgtgtggctgggagtcggcgccgccttcaagtgggccatcgacaaggacatcaagaacttccagaagctcaaggagatgtacaacgagtggccattcttcagggtcaccctggacctgctggagatggttttcgccaagggagaccctggcattgccggcttgtacgacgagctgcttgtcgccgaggaactcaagccctttgggaagcagctcagggacaaatacgtggagacacagcagcttctcctacagatcgctgggcacaaggacattcttgaaggcgatccttacctgaagcaggggctgcgtctgcgcaatccctacatcaccaccctgaacgtgttccaggcctacacgctgaagcggataagggaccccagcttcaaggtgacgccgcagccgccgctgtccaaggagttcgccgacgagaacaagcccgccggactggtgaagctgaacccggcgagcgagtacccgccggggctggaagacacgctcatcctcaccatgaagggtatcgccgccggcatgcagaacaccggctag

SEQ ID NO: 270 - DNA, 4612 bp, Sorghum bicolor
gagtgagcgggagagggtaggtgtcgaggcggcggagatggggcgcggaccggtgcagctgcgccggatcgagaacaagatcaaccgccaggtgaccttctccaagcgccggaacgggctgctgaagaaggcccacgagatctccgttctctgcgatgcggaggtcgcgctcatcgtcttctccactaaggggaagctctacgagtactctagccattccaggtatacgtattcgatcccctctcgccgcctgccggtgcccgttgctatgatcgcccgcttggggtttggagcgctgggtgtgctttaacgcatggttttgggatcatttttaatgccaatccgccgcgttcgtcgaacttcggatggggattgagttgtgggaggtgtttgtagatgcatgcatgtttgtttgttattacgtgtgttggttctgtgtggattaattctagttgcttgcatggctgaactgtgctcgatcaacgatcgctttagatgattggatcgtggaatcgcttgctggttatttcgtacgtacgtacacagtgatgatagcctatttagtactccgtatttctgtatttctttgacatgtattatgacttggcgatactgtcattgcaaacacctccgtatttctgtattgctggtgaatgacaattagcccatgcaaagtagtaagtcccaagccttgagctgactgcctaaaggttattatgaagactcaactttttagcgcagagagaggtcaggattatttgattcataaatactgtttaaaggaaatgtcagccacaaaatataactgggatcagacgcaggaaggattctgattatcaaagtattttttttcatcatgcgattaaactcttcagtatcaagtagctgtattattccagcatgatttctgccaaaggaaacactgcttttgtcttctggatgcatggtgaggaatatgtttatcagtattagtgtactgtttggtgcttcgatgttccttgtatatgtgcatcttgccgattttcagatggtctgtgataacctgaacaaatttctatagaaagagctgttgctgccatgctgtagaagagtcatttggagaactgctattatttatctgtatactttcagaaattctagaagaacaattcggctcttgcgtggtgtctctggtacatgcatgtgtcatatattaagagactatgtgtgttcctcattttagtattatataagtggtgtgcaaggtgatcgtaatatttaaacattagtttgattctttggtccatattcaagtacagtttcaagtttagttcctttatttagtaagtaaacaacacggctatgatagaaaatggatgcttgattatagcacaatttgaccttatgctgatacaagttaattggcattagtacatattctgtccatgcagaatattcgtatataactgatagattcagggaaattttcactgaaaactttctaatgccggagagaaaaatatgtatgttaaaaataataataagcacgttttagcttttgcacacgagtgatatgtgctggtgataatatccaaacatgatagagattatggctggagtcatggcaaaacttgttgtatttttctttagctgaaactacagctcatcacctaaaccggtaatgaattttgtttttaaaaataatatgatatggtttaaggtagagccatttttatatgttgtggattatagaaaactgtgctaattacagttatcagtttgaactgagaatatcaatagatttctaaaaaaatgtatatatcactatacttttgctaatttactgaagatgttacaaactttactgtttaatcccaacaaagaaggtagatgccaaatttgtctaaaagattatgtcagatcgatcaacctgattatagtgtcaaagtgatggaaaattttgttcgcgcaagcaaatgagtagcttgctacattttagagttatttttacatcattatgtagtcttgacttgttttatattattctaaaacacccttcttgatgagttcatgtatatgaactatatatgaagcaccatctgttcattgagtaataacccacttaggccttgtttggatgttgtcggattcacctcaatccacatgtgttagagtggataggggtagaatttagttcaatttccactccaacccacctaacacatgtggattgatgcgaatccgactacatccaaacaaggccttatgtgtgcatgtgatgacacatgttgttccacaactaggcttgcatcatctagttatgcatgtgattcaaggttaactgtccaatgtcttctgcaattctagaatcgggagaatatacttgtatatatcttgcatctcttaaatagggagaaattaaatcttggtttcttgaatgttgtgcatcgtgaattttgtcgttttgtatgcaagactaatatgcttcatctagaaatatagtaagtacaagaaaaagaatattgtacctggctatttgtcttagtatattaagttctaaaatgagagcacaacattttttgctggaacatgacattgctgtatgatgcttttttctttttttgcagcatggaaggcattcttgagcgttaccagcgttactcatttgaagaaagagcagtacttgacccaactattgaagaccaggtatagttatggaatatctactataactactattgttacagcaaaatgcgcattgatatgtggttcattttataccaggcaaattggggagatgaatatgtccggttaaaatccaaacttgatgcacttcagaagagtcaaaggtaccagagacttgctcacgaggacccttattctggttatgataatgtttactgattcagacttattgtatctgtctattcccaatggaaggcaactgttaggagaacaattggattcactaaccataaaagaactccagcaactggagcaacaattggacagttctttgaagcatattaggtcaagaaaggtgaataaattggggttaaatttgttgttcggtgcacagctaatttggttatttgttgacgtcttagtcagttattatattatagttttattttattttggtacagaatcagctcatgttcgattcaatttccgagcttcagaaaaaggtcagttacactctagattcccttgtatctcgcattctggatgtgttacacaagtcactagtgaaaatcattgttacgggcacacctccagaatttgggaatgagatcaaacgtttcagtctcatcatggcataattatacacatgtttcattgagattaatgtatttacaatgtagtttaacatttgcaatctgctgccaccgttcatcatgcaatgttacagatatactctaaaccagagtcaagttttgtctctttctgtagaagtctcagataaggaacacatcagtggaagacctgaatctgtgtgagtcacccttcgatatttttaggaaatgcaagttagtttcaagcgggagacaggacaactgataaccgttgcatcatgggtggaaaccatggaataggggggaaggggccatgaaatgagttagtttgagttggacgtgaaactgatctccagtggatgccctaaacttaggaaatggcttactatgagtagcattttaccatgaaatagtgaaaaaggataatgagaaagaaagcactcaggtcgaagtgcttgagcagactagttgtggtaactatagctggtctggcaacaaaccaagcactcaggtctaagtgcttgagcagacaagttgtggtaactatagctggtctggcaagaaacctgtaaaaatcccagaatgttgattgctgacaagatttgtggtgcatctttacaatcagttgtattcatgtgtgcaggagaaagcacttacagaccaaaatggtgtcctgcaaaaggtaaagcttcctttctcgtttatggcatagtgacaatgttggtctaggaggtcagcagaccctgatgttaattgtatttttttataacagctcatggaggcagagaaggagaaaaacaatgctttaatgaacgcacacctccgggagcagccaaatggagcatcaacaagctccccatcactgtcaccaccagtagttccagattccatgccaactctaaatattgggtatcatgcttccactgaattcattactgtgcacaactaaagtgaaatgtcccacttcatttctagcaaaaaaatattgataataagtagtagtttagctataccaagatttgttaataaatagagaatttatgaagggtgttggttaaaggtagaaacacacatgcttgaaagtagctttattgaacgctaagcataccttgctagctaaatcttcaaaggtatatcgattgggcactgcattttatatagtgctccagcataattacttaatttaccccatcgtcaccattgtaggccatgtcaacctagaggagcaggaaaatctgagcctggtccgtctcctgctcctgcacaagcaaacagcggcaacctgccaccatggatgctccgcactgtcagtaacaggtgagctcttcccaatgcag

SEQ ID NO: 271 - DNA, 384 bp, Clostridium beijerinickii
atgactgaattgaaacaagtgtataaatgtgaaatttgcggtaatattgtggaggttgttcataatgctggaggtacactagtatgttgtaatcagccaatgaagcttaaagctgaaaatactactgatggagcaacagaaaagcacgttcctgtaattgaaaaagttgaaggtggagttttagtaaaggtaggctctgtagaacatcctatgcttgataaccactatatagaatggattgaaattcatactgaaagtaacgtatataaaaaattcttaaaacctggtgaaaagcctgaggctttctttaaggtagatgaacctgttctttttgctagagaatattgcaacttacatggtttgtgggctgaaaaaaattcttaa

SEQ ID NO: 272 - DNA, 918 bp, Sorghum bicolor
atggacgggggcacggtggaggatctcatacggcggctgctggacggcaagaagcacaaggtgacggggaagaaggcggtgcagctgacggagcccgagatccggcacctctgcgtcaccgccaaggaggtcttcctctcccagcccaacctcctggagctggaggcccccatcaacgtctgcggtgacatccacgggcagttctcggacctgctgcggctgttcgagtacggcggcctgccgccgacggccaactacctgttcctcggcgactacgtggaccgcgggaagcagagcatcgagaccatctgcctgctgctggcgtacaagatccggtacccggacaacttcttcctgctgcggggcaaccacgagtgcgcctccatcaaccgcatctacggcttctacgacgagtgcaagcgccgcttcagcgtccgcctctggaagctcttcaccgactgcttcaactgcctgcccgtcgccgccgtcatcgacgacaagatcctctgcatgcacggcggcctctccccggacctcgacaacctcaaccggatcagggagatccagcgccccgtcgacgtccccgaccagggcctcctctgcgacctcctctggtccgaccccgaccgcgacagctccggctggggcgacaacgaccgcggcgtctccttcaccttcggcgccgacaaggtcaccgagttcttgaacaagcaggacctcgacctcgtctgccgcgcccaccaggtcgtggaggacgggtacgagttcttcgccgaccggcagctggtgaccatattctcggcgcccaactactgcggcgagttcaacaacgccggcgcgctgatgaacgtcgacgccagcctgctctgctcgttccagatcctcaagccgtacaggggcaaagcacagacggagtga

SEQ ID NO: 273 - DNA, 378 bp, Zea mays
atgcagggcgggaggagcatgagcgcagtggaggccgccaaggaggcggcaacgaacgtgggtgcctcggcctgggccagcaaggagaagaccaaggccgtcgtgcaggagaaggcggccaaggcgagggcgcacgaccctgccgagaaggcggtggcggaagccaggatgcaggagcgtgtccacgaggtggaggccatcaagcaggacgccatgcgcaagaacgccaccgccaaggagcgcgccaccgcggcagagcaccacccgacgccactcgacgtaggggccgcctcagcgacggcgcctgctgccggtgcaggtgtgccggttgctacgaccgagacgggcgtagcagcgaaaccgcccggaggcacgtga

SEQ ID NO: 274 - DNA, 372 bp, Zea mays
atggctaatggttgctccacgactaccacaagctccctgctcctcttcttccttctctcttacttgctcatcggtcatgctctctgcagccaaggccacaatggcagaacatcaggtgctgattatgtggtgcaatatctccaccaggaattacctggtaaacatatagttttgcaggagaccgtcaagggtctaaacaaaggcatattgccaaagtatgcacggagaatgttgatcggctcaattgcgccaatatgcacatacaacgagtgcagagggtgtcgattcaagtgtactgctgagcaagtcccagtggatgcaaatgaccccatgaacagtgcttaccactacaagtgtgtttgccacaggtga

SEQ ID NO: 275 - DNA, 1809 bp, Ustilago maydis
atgaagtccatcttggttggtgccgcgctggcgactttcgccacgtttgtctcggccgctccctcgactatcgaccctttcgactttcgggaggccgacctcgtctaccctagaatgaattatgactcagctcagcacgatgccagagctctcggcaaaggacagtgcctcaattcgaacggcagctcgctagccggctaccagccggctctctacaccgagcctgtccggcctcagatccacttttcacccacggtcaacttcatgaacgatcccaacggtctcgtctacagcaatggaaagtggcacctcttttatcagtacaatcccaccgaaaacgttgccggcaaccagcactggggtcatgccgtctcgaccgacctgtaccactgggagaatttgcccatcgccatcgctcctgaaaaggagggcgagggaatctttagtggtaatgcagtcatcgactttgaaaacaccagtggctttttcaacgagtcgacacccaaggatcagcgcatcgtggccttttatacgctcaacacgccaacttcgcagacgcagcacctcgcctactcgtcggacggtgtccactttaccaagtatcccgaagccgtcatctcgcgcaaccaaacccagttccgtgaccccaaggccttttgggacgaaaagtcgtcgcgttggattgttgccctggcgctctcgcaggagtttggcatagtcttctactcctcgcctaacctgaaggattggaccgaggtgagccgcttccagtcgtccggtatcctcggctaccagtacgaatgtcccgacctcttccaggtgccgatcgagggagggcccgatgacggcaagatgatgtacgttttggccatctcgatcaatcctggtgctctcgtgggcggatctttcgtacaatactgggttggcgactgggatggctccaagttcacccctcgcgacaatgctgtaaggactatggactttagtaaggatttctatgctttcagcagctggaacaacagccctggaaagaaggcctatgccattgcctgggctaacaactggcagtacaccaaccaggtgcccacttcgcccttccgttcgatccagagtctgccgcgtgagcttacgctcaagtactatcgcccgactccccaatttggcgacctgatcctgaacaacaagccggccaacctgtctgccctccgaagcaagaccctgtacaaatctgacaatggcaacagcgcaaccaacaagactgttcacctcaagggcaagggcgcgttcgacatcacggcaacgttcaagctgcctgccagcagcaagatcacttacaacacgatcgcctcgtttgagatttttgctggcgatggcaagcagagcgtcaagacgggtatccagatgggcgagcctgctgttgcctacatcgaccgtcgaggtgctggtccctcgtttgccgctgagaacccgttcttcaccgacaagacctcgggtattgtccgctacgctgccaactacacctctgcatccgatggcgggtctgaccagtacgttctcggacctctcccgacatcggcctatctcgacactgctggcaaggatcagtacatcaagctgcaggccgttgtcgacaggtcagtgatcgaggtgtttgtcaacgacggtgaactggccggcacctcggtgttctactttgacaacgacgagattcctgccaaggtgactgtttcgattggtgacaaccagatcaagctggtcgatctcgaggtcactgcacttgactcgatttggtccaagtgcaacaagtga

SEQ ID NO: 276 - DNA, 2046 bp, Ustilago maydis
atgtcgcctgttcccacacaagactcgtcctcgatgctgccgagtacaatgcaacacgctcacacttcgttggttgagccagcgcaaaagcttgggtccgattcattctcgtacgctcatctgtgctctactcggtcgcactcgcatccgatccaagaccacccgtttgcagcggcgtccgagttttcaagtctcgcatcaccaacctcatcagcgtcggcttcagaccatcccacttgcacgccagcatcgtcggggatcccttcgccgttcgaagagcttgcagagtccgacatgctcaaatcctcgggacaagcggattgcgactcgaaaaacacgcttttcgaccagtggagacccacttcacactttcttggacctcatggctggatgaacgacccatgcggtccttcgtacgatccacgcaccggcctttaccatctgtggtatcaatggaacccgagcggatccacgtggggcaatattagctggggtcatgcgtatagccacgacatggtccactggacatgtcgtcatcagcccgtgctgagtcccggcgcgaatcatgactcagagggtgtgtttaccggatgtgtgctgcaaagagcatcgattggcgctccagagcaagctgcatcgagcgcagagatgagcgcgctctacacggccgtctccaagctgccgatccaccacactctgccctaccactacggaagcgaaaaggtggtgctttcaacctcggcagatggaggtgaaacatggactccccaaggcatcgtcgtacacggaccacccgagcatctcgacgtgatctcgtggcgcgatccgtacattggcgagtggcctcttctagatgcgctccttgcacgcgagactcgcgggctgtacgcactcatcgccggtgggatcaaggacaccacaccaacgacgtttgcttactcgatcgacgccaccgatctgagccaatggacgtttgtcggcacgctcgccgacgtcggcgtcaattacaaagcggctccgtacggtattgatctgggcaagaactgggaagttgccaacttcttcaccatcaccgacaaatccaatgcggctcgtagcacggcagctgagtatctgctgatcaacgtcgagggatgtaccgagccgggaccggcacgacagcccgtgtacatgaggttggacctcgatgcgactcaacaaaccgacgagggcgagattcgtcttgcatcagcacacgtgggcttactcgatcacggatgcctgtacgcggctagtagctttcacgatcaaaagcacaatcgaaggatcatgtggggctggatcacggaagacgacttgcccgaggagtattacaacacacagggatgggctggcttgatctcgctgccgcgtgagctgttccaccatgcttcttcgtgcgaactcggcattcggcctgcaatcgaggtcgacgagcttcggcgcggtgcacagcgcatttcggtctcgtcggactgcatggtgtcgcatgccattctcgagcttgctgaagctgcggcgacggatgcaactgcagatgcagatgcggtggcagtggcgaaggcggaggcggaggcggaggcggtcgagctcggtgtagtgcatgtaccccaggtcaacaggcgctcgtacgagctgcaaatcgagctgagtgccgatcagcctggcttggtcgtagcgcacagcaaagacttgtcgactcgcacactggtctacatttcatcttgcggacagctggttgtcgaccgctcgctctcggccggtcagacgtcggtgatcgcaaaacagatcaacgtaaacacttgcacgcttcgcgccccgctctcgactcaatcacccacacacaagctgcgcatgttcctcgacaactcggtcctggaaatcttcctagacgatctcatcgcgctctccacgcgcatctatccggatccagacgacgtgcatctgtccatcctgaccaaccctaacgcaaagcctcaaggcgacgtccatatctggcaagggctggatcgtgcgattcttggctga

SEQ ID NO: 277 - DNA, 1083 bp, Zea mays
atggaattcaagaactgcgggtcgtcgtcgcagccccggccggcggtggtagtgggcgaggaggcggcgttggcgagacagggatcagtctactcgttgacgttcgacgaattccagagcgcgctcggcggggccgccaccggcggtggcggtggcggcagcatccccaaggatttcggttccatgaacatggacgaactgctccggagcatctggaccgcggaggagacccaggccatggcctccgcttctggcgctggagcgggtgcggggatgccgccaacgtcgctgcagcggcaagggtcgtcgctcacactgccccgcacgctcagcaccaagacggtcgacgaggtgtggcgcaatctcgtgcgcgacgagccgctgcagggggcggacggcggcgggcaccagcagcaccaccgccagtcgacgctcggggagatgactctggaggagttcttggtcagagctggcgtggtcagggagaaccccgctccggctcctccagcaccaccacccatgatcccgccgcggccggtacctgtcgcccctaaaagctccgcctttttcgggaatttaccgggtgccgacgccgacaccgccgcagctgcggcagcgctggggtttgcaccggtcggcatgggggatctggcccaaataccgcccagggcagcaggcatgggaggcggcgccatggctgtgcaagcagcggtgaaccagcttgattctggcgggaaggggtacagcgacctgtcgtcgccgacggagccgctcccgttttcgtttgaggggatgattcgagggaggaggcatgggggcggagtagagaaagtggtggagaggcggcagaggaggatgatcaagaacagggagtccgccgccaggtcccgagcgcgcaaacaggcttatactatggagttagaagctgaagttcagaaactcaaggagcagaatcaggaactggagaggaaacaggcagagattatggaaatgcagaagaacgagctaccagaaatgttgaaggatccattcggacggaagaagcgtctgtgcttgcgaagaacattgactgggccttggtga

SEQ ID NO: 278 - DNA, 906 bp, Agrobacterium tumefaciens
atgacaaattgctttcaaggagacagccatgccccacactttgttgaaaaacaagttgccttttgggaagaacctaaagccacttgctcttcaaggaggaatatcgaggaagagaatataacagcctctggtacagacttctcttgtgcaaaaaaatcaatttgtattcaacatatcgcaagaccgatggatctacgtctaattttcggtccaacttgcacaggaaagacatcgactgcgatagctcttgcccagcagactggcctcccagtcctctcgctcgatcgcgtccaatgctgtcctcaactatcaaccggaagcgggcgaccaacagtggaagaactgaaaggaacgactcgtctgtaccttgatgatcgccctttggtaaagggtatcattacagccaagcaagctcatgaacggctcattgcggaggtgcacaatcacgaggccaaaggcgggcttattcttgagggaggatctatctcgttgctcaggtgcatggcgcaaagtcgttattggaacgcggattttcgttggcatattattcgcaacgagttagcagacgaggagagcttcatgagcgtggccaagaccagagttaagcagatgttacgcccctctgcaggtctttctattatccaagagttggttcaactttggagggagcctcggctgaggcccatactggaagggatcgatggatatcgatatgccctgctatttgctacccagaaccagatcacgcccgatatgctattgcagctcgacgcagatatggagaataaattgattcacggtatcgctcaggagtttctaatccatgcgcgtcgacaggaacagaaattccctttggtgggcgcgacagctgtcgaagcgtttgaaggaccaccatttcgaatgtga

SEQ ID NO: 279 - DNA, 684 bp, Oryza sativa
atgggtgaaagggtgaagctcatcggtgctttcgccagtgcatacggccaccgcgcagaggtggcgcttcgcctgaaaggcgtgcgatacgagctcatcctggaagacctccgcaacaagagcgacctgctgctcaaccacaaccccgtccacaagctcgtccccgtcctcctccatggcgaccgctccttgagcgagtccctcgtcatcctcgagtacatcgacgagagcttccatggtccacccatcctcccaaccgatccgtacgatcgagccgtggcgcgtttctgggcgcagttcatcgatcagaagtttggtaggttcaatttctggatcccgttcgtgcaaatggagggcaacatgcaggattgtttcgtgagggaagcaaaggagaatctggcgcttcttgaagggcagctcaaggggaggagattcttcggaggcgacgccatcgggttcttggacatagcagcgtgcttgatagctcactggcttggtgcgttcgaggaggtatgtggggtgaccttggccacggatgaggagttccctgctttgtgcgagtggaggagacgctacgtcaacgatgaggccgtgaagccgtgcctgccgaatagggacgaactcgttgcgtattaccgtgaacgcaaggagatgatcaaagccgccggaaggcagcacaaatga

SEQ ID NO: 280 - DNA, 1449 bp, Oryza sativa
atggaggattctgcgcggccgacgcccgctgactccggggagctccccaacggcgcggggatggcggaggatgcggtggtggcgcccgacgcgggggaggctccggaggagggggaggaatcgggaattgcgaacgattcggagacgaacgcggctctgggcgcagagggcgagccctcgcgggcgctcaccatgcgggagctgcttggggagctcaaggacagcggggagccctcgtcggggagatccacgctttcggagggcaatgggatcggatctgccggtgcggagcgcgccagccaggacagcctacagttctcatcccatcatgatgttgccatggacttgataaatagtgtcactggagttgacgaggaaggtcgttctcgtcaacgcattctttcctttgctgccaaaagatatgttagtgccatcgaaagaaatccggaagatccagatgcatactataattgggccctagtcctccaggaaagtgcagataatgtggatcctgattctagttcttcaaaagattcattactcgaggaggcttgcaaaaagtacgctgaagctacacgactctgcccaacgctatatgatgcatattacaactgggctattgctattgctgatcgagccaaaatgcgtggacgtaccaaagaggctgaagaactctggaagcaggctataatgaattatgacaaggcagtccagttaaattggaacagcccccaggccctcaacaactggggtttgggactacaggagctgagcgcaattgttccagcccgagataaacaaacaatcataaaaacagctataagcaagtttcgatctgcaatccagttgcaatttgatttccaccgggctatttacaatcttggaactgtcctgtatgggttagcagaggatacaatgaggtctgcaggtccagatgtctctccaaatgacttgtacagtcagtccgccatttatgtcgcagctgctcatgcattgaagccaaattattcagtttatcgcagtgctctacgtctggttcgatcaatgctacctttaccatatctaaaagctgggtatctaactgctcctccagcagacaacaccattgcaccacataaacattgggaaaggtcagaatttgtcttaaaccatgagggactccagcaggtcgatgcctctgaaagcccttctagcaaaccccttggacatatggggagaagcaaaaaatatattaaagtagctgttgaagatatcgtttcagtgtctgcatgctccgatctaacactgccacctggtgctggcctttgtatagaaacaattcacgggcctttgttcttggttgctgatacctgggagtctcttgatggttggttagatgctatacgcttagtgtacaccatatttgcacgaggaaaaagtgatgtattggcaggtatcattactggttga

SEQ ID NO: 281 - DNA, 585 bp, Oryza sativa
atggctgatccgcggctgttctcgtcgggatccggcacccgcgacgaccggacggacgcctccggcaggcggctgtacaacccctaccaggacctgaatatcccctacaagcagctctacgacctccccacctccccggagttcctcttccaggaggagtcgctcgcccagcgccgctcctggggcgagaacctcacctactacaccggcataggctacctctcgggcgccgtcgccggcgccgccgtcggcctccgcgacgccgcgcgcaacgccgagcccggggacaccgccaagatccgggcgaaccgcgtcctcaactcgtgcggcagcaacggccgccgcatggggaacacgctcggggtcatcggcctgctctacgccgggatcgagagcggcatggtcgccgtccgcgaccgcgacgactggatcaacagcgtcaccgcggggctcggcaccggcgcgctcttccgcgccgccaacgggccgcgctccgccgccgtcgcgggcgccatcggtggggtcctcgccggcgccgccatggcaggcaagcaggcggcgaagagatatgtgcctgccctctga

SEQ ID NO: 282 - DNA, 537 bp, Oryza sativa
atgtacttgttgagcccaagaaatggcgacgaggaggacgaacaggaggaaatccaggagctgatcagcgacgacgagccgcccaatctcaagttggcatcctgcgccactgcagccagcagcagcagcagcagcggcagcgacatggagaagggaagaggtaaagcctgcggcggcgggagtacggcgccgccgccgccgccgccgtcgtcgtcaggtaaatccggcggcggcggcggcagcaatatcagggaggcggcggctagcggcggcggcggcggcgtgtggggcaagtacttctcggtggagtcgctgctcctgctggtgtgcgtgacggcgtcgctggtgatcctcccgctcgtgctgccgccgctgcccccgccgccgtcgatgctgatgctggtgccggtggcgatgctggtgctgctgctggcgctggcgttcatgccgacgacgacgtcgtcgtcgtcgtccgccggcggcggcggcggcggcggccgcaatggggcgacgacgggacatgctccctacttgtag

SEQ ID NO: 283 - DNA, 495 bp, Oryza sativa
atgaaattccccacacggccaccaaccgtgccgatggcacccgccaccgccaccgccgtggcgtccccctccacctcctcccggctcctacaccgcagcctcctctcgccaacacccacggccgctcgctgcctccggccgccgctgtgccgcgggcgcctccgcaccgttcgccaggttgtcgccaacggcgacgtctcctcgccgtcctcggacgtggccgccgaggagtccgcggcggcccccaagatcggcaagcgcgtgcgcgtcacggcgccggtacgcgtccaccacgtctccaaggcgccggacctggacatctgtggcatggagggtgtggtcaagcagtacgtcggcatctggaagggcaaacgcatcacggccaatctccccttcaaggtggagttcgagctcagggtggatgggcaggacaaaccggtccggttcttcgcccaccttcgagaggacgaattcgagctcgtcgaagacgaatag

SEQ ID NO: 284 - DNA, 750 bp, Oryza sativa
atggggagagggccggtgcagctgcggcggatcgagaacaagataaacaggcaggtgaccttctccaagcggaggaacgggctgctgaagaaggcgcacgagatctccgtgctctgtgacgccgacgtcgcgctcatcgtcttctccaccaagggcaagctctacgagttctccagccactccagtatggaagggatccttgaacgctaccagcgttactcgtttgatgaaagagccgtactggagccaaatactgaggaccaggaaaactggggtgatgaatatggaattttgaagtccaaactggatgcacttcagaagagccaaaggcaactcttaggtgaacaattggacacactaacaataaaagaactccagcaattggaacatcaactggaatattctctgaagcatataagatcaaaaaagaatcagcttctgtttgaatcaatttctgagcttcagaagaaggaaaagtcacttaaaaaccagaataatgttctgcaaaagctcatggagacagaaaaggagaaaaacaatgctataataaacactaaccgggaggagcaaaatggagcaacaccaagcacatcatcaccaacaccagtgacggctccagatcccatcccgacaacaaataacagtcaaagccaaccaagaggatcaggggagtcagaagctcaaccgtctccggcacaagcaggcaacagcaagcttccgccatggatgctccggacaagtcacacatga

SEQ ID NO: 285 - DNA, 204 bp, Oryza sativa
atgagcgaccagagctcgtaccctaaccctgctcaagggtactaccagggtcccccagcctcggcggcggccggccaagataacacggcggccggcggtggcaagtccaacgcagccaagaaagaccaaccgagcttcatggataacctccttgcttgcctcccctgtgcccgcccagccgaagccaagaacgacgcgagctaa

SEQ ID NO: 286 - DNA, 306 bp, Oryza sativa
atgtttttctattataaactcttctattataaaattttaatgtgtttctgtaaaaaaaaatccgtatttttttccatcgtcgtgtcggtttatttcccacacgacgcaaccgcgctcactcagccaatctacgcattcgcttacagatacacgcgcgcccagctgaccatctgccccttaggctcttggctgccgcagctggacaatggccatgcctcacctgagccaaatggtctaatgggtttttcttttttttattattctctgttttcacctactcactttgatatatcttggtataaataa

SEQ ID NO: 287 - DNA, 1002 bp, Oryza sativa
atgtcgatgatgagcttcttgagcatggtggaggcggagctgccgccggggttcaggttccacccgagggacgacgagctcatctgcgactacctggcgcccaaggtcgccggcaaggtcggcttctccggccgccgcccgcccatggtcgacgtcgacctcaacaaggtcgagccatgggacctccccgaggtggcgtcggtgggcggaaaggagtggtacttcttcagcctgagggaccgaaaatacgcgacggggcagcgtacgaaccgagccacggtttcggggtactggaaggccacggggaaggacagggtggtggcacgaagaggggcacttgtggggatgaggaagacactggtgttctaccaggggagggcacccaagggaaggaagacagagtgggtgatgcatgagtacaggatggagggtgtgcatgatcaacaagcttccagcttctcctccaaggaagactgggtcctgtgcagagtcatctgcaagaggaaatcaggagggggtgcaacctccaagtcaagaagcctcaccaccaccaccaccaccattgtccatgacacatccacaccaacctcctcaccaccattgccacccctcatggacaccaccctagctcagctccaggcctccatgaacacctcctcctcctccgccatcgccgccgtcgccgcacttgagcaagtgccctgcttctccagcttcagcaacagcattgccagtaacaacaacaacagcaacagtgctactgtcaatgcacagcaatgctacctgccaattgtcacaggtagcaacaacaatggcatgagctacctggatcatggcctgcctgaatttggcagcttcttggacacccagagctgtgacaagaagatgctcaaggcagtgctgagccagctcaactccattgggggtgaggtgttgccaggcctgcctcctccatctgaaatggctgctgctgtcagctcttcttggatgaatcacttctag

SEQ ID NO: 288 - protein, 212 aa, Secale cereale
MDAADAGSPRFGHRTVCSEPPKRPAGRTKFKETRHPLYRGVRRRGRLGQWVCEVRVRGAQGYRLWLGTFTTAEMAARAHDSAVLALLDRAACLNFADSAWRMLPVLAAGSSRFSSAREIKDAVAVAVVEFQRQRPFVSTSETADGEKDVQGSPRPSELSTSSDLLDEHWFSGMDAGSYYASLAQGMLMEPPAARAWSEDGGEYSGVHTPLWN

SEQ ID NO: 289 - protein, 290 aa, Hevea braziliensis
MELYNGERPSVFRLLEKYMRKGLYSILTQGPIPTHIAFILDGNRRFAKKHKLPEGGGHKAGFLALLNVLTYCYELGVKYATIYAFSIDNFRRKPHEVQYVMDLMLEKIEGMIMEESIINAYDICVRFVGNLKLLSEPVKTAADKIMRATANNSKCVLLIAVCYTSTDEIVHAVEESSELNSNEVCNNQELEEANATGSSTVIQTENMESYSGIKLVDLEKNTYINPYPDVLIRTSGETRLSNYLLWQTTNCILYSPYALWPEIGLRHVVWSVINFQRHYSYLEKHKEYLK

SEQ ID NO: 290 - protein, 290 aa, Hevea braziliensis; identical to SEQ ID NO: 289

SEQ ID NO: 291 - protein, 371 aa, Zea mays
MVLAAHDPPPLVFDAARLSGLSDIPQQFIWPADESPTPDSAEELAVPLIDLSGDAAEVVRQVRRACDLHGFFQVVGHGIDAALTAEAHRCMDAFFTLPLPDKQRAQRRQGDSCGYASSFTGRFASKLPWKETLSFRYTDDDDGDKSKDVVASYFVDKLGEGYRHHGEVYGRYCSEMSRLSLELMEVLGESLGVGRRHFRRFFQGNDSIMRLNYYPPCQRPYDTLGTGPHCDPTSLTILHQDDVGGLQVFDAATLAWRSIRPRPGAFVVNIGDTFMALSNGRYRSCLHRAVVNSRVARRSLAFFLCPEMDKVVRPPKELVDDANPRAYPDFTWRTLLDFTMRHYRSDMRTLEAFSNWLSTSSNGGQHLLEKK

SEQ ID NO: 292 - protein, 325 aa, Zea mays
MKPVATDSHLDLNQMPSVGSKDVPGRAYCTILSPPSQAYNLDSSGLFSFSIPTTQPLTSYAMSSLVDGSAVTLAAQGLQSDSVRDKGLEIDSVHEKGVEVGSTPDPAGVELESAPAKRGAELSSKIELHSILGPLCYQIPNMEDVVPISTPLRSEHNSAQKTSQHCMSPNGYTSPSATIGNVSSQLTVDSILRIAADTFPCTPSILRKRKRDKATPASGNELKTGGVTNDSFYTPNRTNGKDTTSPRSFKTAASFLSLGSVNGLLTSARSFDSSPPYQKKRSKRMAIIKSVEKQLDFSADGLDTSGSEIMNSPCHNSQGANSNRM

SEQ ID NO: 293 - protein, 325 aa, Zea mays; identical to SEQ ID NO: 292

SEQ ID NO: 294 - protein, 350 aa, Zea mays
MAAEINGGFLAAGGPRQHRGGLGCGRCFQNISLLHGLGIKFVLVPGTHIQIDKLLSEIGNKAKYVGQYRITDEDARKAAMDAAGRIRLTIEAKLSPGPPMLNLRRHGVIGRWHGLVDSIASGNFLGAKRRGVVNGIDYGFTEEVTKIDVSRIRERLDSDSIVVISNMGFSSSGDVLNCNTNEVATACALALEADKLICVVDGQVFDEHGRAIQYMSIEEADFLIRKRARQSDIAASYVKVVDEEGINSLHKGDNRPSLSPKAYINGYAASFRNGLGFNNGNGIYSGEQGFAIGGEERLSRSNADPFQNGLGFNNGNGIYSGEQGFAIGGEERLSRSNGYLSELVAAACVP

SEQ ID NO: 295 - protein, 299 aa, Arabidopsis thaliana
MSETTKDDGSSQKKSVRKEKRAYVLRKWTQFDVGRASTVGTVHLLCLLAPFNYKWEAFRFGIILAILTNLCITFSYHRNLTHRSFKLPKWLEYPFAYSALLALQGDPLDWVSIHRFHHQFTDSDRDPHSPIEGFWFSHVLWIFDTDYIREKCGRRNNVMDLKQQWFYRFLKKTLVLHILAFWTLIYLWGGLPYLTWTVGFGGVIGYHGTWLVNSACHICGSQAWQTNDTSRNVWWLALLTMGESWHNNHHAFETSARHGLEWYQLDITWYLIWFFQALGLATNVKLPTDAQKRKMAIRR

SEQ ID NO: 296 - protein, 662 aa, Arabidopsis thaliana
MGNGVTKLSICFTGGGGERLRPKDISVLLPDPLDEGLGHSFCYVRPDPTLISSSKVHSEEDTTTTTFRTISGASVSANTATPLSTSLYDPYGHIDRAAAFESTTSFSSIPLQPIPKSSGPIVLGSGPIERGFLSGPIERGFMSGPLDRVGLFSGPLDKPNSDHHHQFQRSFSHGLALRVGSRKRSLVRILRRAISKTMSRGQNSIVAPIKSVKDSDNWGIRSEKSRNLHNENLTVNSLNFSSEVSLDDDVSLENQNLQWAQGKAGEDRVHVVVSEEHGWLFVGIYDGFNGPDAPDYLLSHLYPVVHRELKGLLWDDSNVESKSQDLERSNGDESCSNQEKDETCERWWRCEWDRESQDLDRRLKEQISRRSGSDRLTNHSEVLEALSQALRKTEEAYLDTADKMLDENPELALMGSCVLVMLMKGEDIYVMNVGDSRAVLGQKSEPDYWLAKIRQDLERINEETMMNDLEGCEGDQSSLVPNLSAFQLTVDHSTNIEEEVERIRNEHPDDVTAVTNERVKGSLKVTRAFGAGFLKQPKWNNALLEMFQIDYVGKSPYINCLPSLYHHRLGSKDRFLILSSDGLYQYFTNEEAVSEVELFITLQPEGDPAQHLVQELLFRAAKKAGMDFHELLEIPQGERRRYHDDVSIVVISLEGRMWKSCV

SEQ ID NO: 297 - protein, 78 aa, Arabidopsis thaliana
MSNLRLTIAVFLAALFQTLWWKPRGKRPQSNFHAKRIRTVLQTLLVMLCTDYRCDKGLCKCHGFGGEKENPTAAPLTA

SEQ ID NO: 298 - protein, 267 aa, Arabidopsis thaliana
MATSARRAYGFGRADEATHPDSIRATLAEFLSTFVFVFAGEGSILALDKLYWDTAAHTGTNTPGGLVLVALAHALALFAAVSAAINVSGGHVNPAVTFAALIGGRISVIRAIYYWVAQLIGAILACLLLRLATNGLRPVGFHVASGVSELHGLLMEIILTFALVYVVYSTAIDPKRGSIGIIAPLAIGLIVGANILVGGPFDGASMNPARAFGPALVGWRWSNHWIYWVGPFIGGALAALIYEYMIIPSVNEPPHHSTHQPLAPEDY

SEQ ID NO: 299 - protein, 944 aa, Arabidopsis thaliana
MESAVQVNGFHPHREITSQGGVNGCVNARIKQVRGATRRCRFELVVLVSWLFWASWLIFDEQTSLDELTCIDELALPGELTCAILSPGPEKRPFSRDFLFLIYTRPYSRVRKISETDAPVASSFSMQRVDPTCLLIRALGFLRIRKLKRSLSDHRRSRTPDGSSERSGADRFRAESLDDDLVEAGYSSSGSSSRTSVVAELRRRISSPLVDRAETGAAATTTFKPRLTDEEIGDEDFKEAIASEEIAIFEPRSAVGGGFGDDVKEMTVSDEIGVFPGVSGPKPGSADYLGPTKTSASSMSTALRFCNAPRGLVARVPETHERPWTTPEGYMCVYEKFLTECGLSFPIPIFLLGFVARRKMALSQLTVAAIRYAVGLIRLAEQCGVEVRRSHYEEVINLKRIGSARPGFYYAQSATKPKIITGVKSKTNDWCFEYFFVKVTKESVGDHEMVDLSEWRMTPVRRLKILDPFPEELKEDLLKIRAVSPYVWPTGEEKERLSLHKPKKARKTPAKRKMKMNTEEVGSYSSRYKRQKTSALKESQEKDHLPSGEDRAARSVEEERRTARSEPPRGHQGRSVVNPGSSVDRSKETREKELATARQGKQLEGSARSDVPPGCNTLIVHPGPANDPHRRRSSGAIEEIRSDARVSKQPDYRWEHYYSGREVKELKEMKAFTDVARKTLDAVGSMNRLAYLYERRFRNMEVLGSQDLRGELSAEKKKNDELLKKLESASKEAAHLKSEVATLAYQRTVMGEERDRCTLDLEKEREKTVELEDRLKSEKKRLRSRREKYAENQTSKALIHVADLFQARMNRVKAHLDDKLKINPKFLDYNQVCGNVALLDELVEAGEIEIKSTELMPRLIADRDALKAEVEGFEITEIEKDDFDVWTLFEKVLEEEHFEPSASGGHSETEAEKDEETSVEDASQRKPETPGPLPDDPAAAPVPE

SEQ ID NO: 300 - protein, 397 aa, Arabidopsis thaliana
MCNQTPLRSMALDSSGKQPEQQQQQQPRASSGNGEARLKLRRTPNEEHEPENYEDLPLDYSPSLFTSLERYLPEQLLNSTRIDKASFMRDLLLRYSPDTERVRVLRHKEYRDKIMSSYQRLHGEIYTLDPSSFFAPSFLGAFSRKSEPNFRSSMVESYPGIFTFEMFKPQFCEMLLAEVEHMEKWVYDSRSTIMRPNTMNNFGVVLDDFGFDSMLQKLVDDFISPIAQVLFPEVCGTSLDSHHGYIVEYGKDRDVDLGFHVDDSEVSLNVCLGKQFSGGELYFRGVRCDKHVNSDSTEKEVYDYSHVPGHAILHRGRHRHGARATTSGHRANLILWCRSSTFREMKNYQRDFSGWCGGCKLDKQRRQRDSINATKEILARKAAEKTLVELASKSCAE

SEQ ID NO: 301 - protein, 140 aa, Arabidopsis thaliana
MLITVLVIFKTSLAFENFSSVDGNFPFSPKHVIIINTLHPHGKLYVHCRNKGEDLGLHKIEYREQIDFRFRVNLRRTTTYTCKFSWPGNEKTFDIFRADRDDSSKSTSGICRECIWYICETGPCRARRDGGDPFCFSWTS

SEQ ID NO: 302 - protein, 227 aa, Arabidopsis thaliana
MAQNDTVKLIGSWSSPYSLRARVALHLKSVKYEYLDEPDVLKEKSELLLKSNPIHKKVPVLLHGDLSISESLNVVQYVDEAWPSVPSILPSDAYDRASARFWAQYIDDKCFAAVDAVVGAKDDEGKMAAVGKLMECLAILEETFQKSSKGLGFFGGETIGYLDIACSALLGPISVIEAFSGVKFLRQETTPGLIKWAERFRAHEAVKPYMPTVEEVVAFAKQKFNVQ

SEQ ID NO: 303 - protein, 134 aa, Arabidopsis thaliana
MSSAQMDPHDKMRSRDISKVARGQQAPRPAHTPGTVSPPPENEATFRAKRGDSGRETDAAVEERFPVTNETRHCFNRFMQYHKCIEKNGRDANDCNNLRDYVRSICPEELVSKIWLKSGRNKESQGHYQRQYED

SEQ ID NO: 304 - protein, 341 aa, Arabidopsis thaliana
MAPTLQGQWIKVGQKGGTGPGPRSSHGIAAVGDKLYSFGGELTPNKHIDKDLYVFDFNTQTWSIAQPKGDAPTVSCLGVRMVAVGTKIYIFGGRDENRNFENFRSYDTVTSEWTFLTKLDEVGGPEARTFHSMASDENHVYVFGGVSKGGTMNTPTRFRTIEAYNIADGKWAQLPDPGDNFEKRGGAGFAVVQGKIWVVYGFATSIVPGGKDDYESNAVQFYDPASKKWTEVETTGAKPSARSVFAHAVVGKYIIIFAGEVWPDLNGHYGPGTLSNEGYALDTETLVWEKLGEEGAPAIPRGWTAYTAATVDGKNGLLMHGGKLPTNERTDDLYFYAVNSA

SEQ ID NO: 305 - protein, 1280 aa, Arabidopsis thaliana
MGEEGSMFGLGGEFPVDDCDGGFEFEDDDETIDIETLYRILDEKPDSAEGSQENLSPVGSSADELKDSQLLNGSFDEHVKMEAGLSPSPAHTCSASLKDWFSLSQGEQPVETCGVSQSEMTSCSISSSFSDPDGNMMAFNPVNCDVDTVSKQDDKIIDSKSMLTPYFDNVTGYGVGLGANHNSSAMSVFFNNSNSLSDSADNYVSSAQDCYNTSGTSLSDHTPNSVQNFAFEFFPNKEEAVNDVESGVSESQSDGASRMIFDRHGRVDNGSLERKPPIDFSSARGISFKFESNPSVSPACVKPYNSFDSHLADSDLDRPNNYSCSFQDNKTVHVKVKPEAESEKVVYSSVPGEFSVRDDAYLSGETNRWWSGASSSAVSYQTDIEKGYSYMAPQTALPSQDSGKISSNHFYDSDTCLQYVVEDPSPVTQNNEYKDFQIQQGDREYIQPRGIDSQFSNASFESVQSHSSECISDSDDDSDVCIIEPYGQSAIPHRPLAMKMPVVSSEYSTVSHNFNQSGGLKLQSNKENMIFQAALQDLTQPNSEAILPDGVLTVPLLRHQRIALSWMAQKETSGFPCSGGILADDQGLGKTVSTIALILKERSKPAQACEESTKKEIFDLESETGECAPLKPSGRSKHFEHSQLLSNENKVGGDSVGKVTGRPAAGTLVVCPTSVMRQWADELHKKVTSEANLSVLVYHGSSRTKDPHELAKYDVVVTTFSIVSMEVPKQPLVDDEDEEKDGVHDGGTAATGFCSNKKRKYPPDSKKKGSKKKKVEFLSGPLAKVSWFRVVLDEAQSIKNYKTQVARACWGLRAKRRWCLSGTPIQNSIDDLYSYFRFLKYDPYSSYVLFCSTIKNPITRNPVKGYQKLQAILKTVMLRRTKGSLLDGKPIISLPPKSIELRKVDFTVEERDFYSKLEAESRTQFREYAEAGTVKQNYVNILLMLLRLRQACDHPLLVNGEYSFTWESSVGLAKKQIQSDASLAICGICNDAPEDAVASVCGHVFCKQCIYERLTGDSNHCPFANCNVRLTISSLSSKTRLDDAMPDMQERATSNSLSPCSDEDLPYGSSKIKAALEILQSLPKAHDLTDSNQISENREYSGLSITPVKNEGMSVDVPIKVAGEKAIVFSQWTKMLNLLEASLVSSHIQYRRLDGTMSVAARDKAVQDFNTLPEVTVMIMSLKAASLGLNMVAACHVLMLDLWWNPTTEDQAIDRAHRIGQTRPVTVVRFTVKDTVEDRILALQQKKRMMVASAFGEDEKGSRQSHLTVEDLSYLFMADS

SEQ ID NO: 306 - protein, 942 aa, Arabidopsis thaliana
MKKRRTFLLFSFTFLLLLSLSKADSDGDLSAMLSLKKSLNPPSSFGWSDPDPCKWTHIVCTGTKRVTRIQIGHSGLQGTLSPDLRNLSELERLELQWNNISGPVPSLSGLASLQVLMLSNNNFDSIPSDVFQGLTSLQSVEIDNNPFKSWEIPESLRNASALQNFSANSANVSGSLPGFLGPDEFPGLSILHLAFNNLEGELPMSLAGSQVQSLWLNGQKLTGDITVLQNMTGLKEVWLHSNKFSGPLPDFSGLKELESLSLRDNSFTGPVPASLLSLESLKVVNLTNNHLQGPVPVFKSSVSVDLDKDSNSFCLSSPGECDPRVKSLLLIASSFDYPPRLAESWKGNDPCTNWIGIACSNGNITVISLEKMELTGTISPEFGAIKSLQRIILGINNLTGMIPQELTTLPNLKTLDVSSNKLFGKVPGFRSNVVVNTNGNPDIGKDKSSLSSPGSSSPSGGSGSGINGDKDRRGMKSSTFIGIIVGSVLGGLLSIFLIGLLVFCWYKKRQKRFSGSESSNAVVVHPRHSGSDNESVKITVAGSSVSVGGISDTYTLPGTSEVGDNIQMVEAGNMLISIQVLRSVTNNFSSDNILGSGGFGVVYKGELHDGTKIAVKRMENGVIAGKGFAEFKSEIAVLTKVRHRHLVTLLGYCLDGNEKLLVYEYMPQGTLSRHLFEWSEEGLKPLLWKQRLTLALDVARGVEYLHGLAHQSFIHRDLKPSNILLGDDMRAKVADFGLVRLAPEGKGSIETRIAGTFGYLAPEYAVTGRVTTKVDVYSFGVILMELITGRKSLDESQPEESIHLVSWFKRMYINKEASFKKAIDTTIDLDEETLASVHTVAELAGHCCAREPYQRPDMGHAVNILSSLVELWKPSDQNPEDIYGIDLDMSLPQALKKWQAYEGRSDLESSTSSLLPSLDNTQMSIPTRPYGFAESFTSVDGR

SEQ ID NO: 307 - protein, 291 aa, Arabidopsis thaliana
MIQDKSKGAKQTLLERPWFLAVALAGLIGGAMLITSFIRATDNTLSLCSTAKNTAASIAKYTATPIQLQSIVHYATSHTVPQQSFEEISISLNVLKERLPCNFLVFGLGRDSLMWASLNPGGTTVFLEEDPEWIEAVLKDAPSLRAHHVQYRTHLSEAGRLLSTYKNEPMCLPAKAFPIRYNEKCPLALTSLPDEFYDTEWDLIMVDAPKGYFPEAPGRMAAIFSSAIMARNRKGDGTTHVFLHDVNRKVENAFANEFLCEKYKVNSVGRLWHFEIPNAANMTDQPGDRFC

SEQ ID NO: 308 - protein, 183 aa, Arabidopsis thaliana
MNHFAVQPNAFAAGGDLRSSSVSVVERDQTTVVCPKPRRIGLRNNHHHPSRSLRCYFSHQLELCESKAETDILDIILTKDGYGAEQVNKQVIDSPSPFLCGSPPSRVANPLTQDARFRDEIVSVSSVIPPQLGLPPSSSPSSSSGRKGGCVVRGNFGNSPKVRVEGFDCLDRDSRNCSIPALA

SEQ ID NO: 309 - protein, 540 aa, Arabidopsis thaliana
MKLLGLVFLLFNLFMFSFSRKLLTESGGGLHDEAALLKLKSSFLDPNGVLSSWVSDSSSNHCSWYGVSCNSDSRVVSLILRGCDELEGSGVLHLPDLSSCSSSKRRLGGVISPVVGDLSEIRVLSLSFNDLRGEIPKEIWGLEKLEILDLKGNNFIGGIRVVDNVVLRKLMSFEDEDEIGPSSADDDSPGKSGLYPIEIASIVSASVIVFVLLVLVILFIYTRKWKRNSQVQVDEIKEIKVFVDIGIPLTYEIIVRATGYFSNSNCIGHGGFGSTYKAEVSPTNVFAVKRLSVGRFQGDQQFHAEISALEMVRHPNLVMLIGYHASETEMFLIYNYLSGGNLQDFIKERSKAAIEWKVLHKIALDVARALSYLHEQCSPKVLHRDIKPSNILLDNNYNAYLSDFGLSKLLGTSQSHVTTGVAGTFGYVAPEYAMTCRVSEKADVYSYGIVLLELISDKRALDPSFSSHENGFNIVSWAHMMLSQGKAKEVFTTGLWETGPPDDLVEVLHLALKCTVDSLSIRPTMKQAVRLLKRIQPSRL

SEQ ID NO: 310 - protein, 202 aa, Arabidopsis thaliana
MSVELCSVRPLFGGAISTVFPQRFQDVSNIRQVPDHQEVFVDPSRDESLIFELLDFKAEVGDIGSASWFLNDLASEQDAEGFQLIEQSEVIEAPGLSFRNISAVATTAIGEMAISKGRQGREAQNLVRVYVANIRLKGVDTDVLVTAYEPILINPLSESADAVGSGLAVPASQSGKMPMCDIIKQSLSTFKVNDWNLFGSSA

SEQ ID NO: 311 - protein, 298 aa, Arabidopsis thaliana [sequence omitted]

SEQ ID NO: 312 - protein, 392 aa, Arabidopsis thaliana
MVVDVESRTASVTGEKMAARGCDACMKRSRASWYCPADDAFLCQSCDASIHSANHLAKRHERVRLQSSSPTETADKTTSVWYEGFRRKARTPRSKSCAFEKLLQIESNDPLVPELGGDEDDGFFSFSSVEETEESLNCCVPVFDPFSDMLIDDINGFCLVPDEVNNTTTNGELGEVEKAIMDDEGFMGFVPLDMDLEDLTMDVESLLEEEQLCLGFKEPNDVGVIKEENKVGFEINCKDLKRVKDEDEEEEEAKCENGGSKDSDREASNDKDRKTSLFLRLDYGAVISAWDNHGSPWKTGIKPECMLGGNTCLPHVVGGYEKLMSSDGSVTRQQGRDGGGSDGEREARVLRYKEKRRTRLFSKKIRYEVRKLNAEQRPRIKGRFVKRTSLLT

SEQ ID NO: 313 - protein, 147 aa, Arabidopsis thaliana
MGLQGQLSDVSSDSIPLMLLALLATFFRHVRSLLLFPSSAPVVVVTSNLSVLADQLNLNRLFSYRYSDNAASDCIVCLSKLKTGEEVRKLDCRHVFHKQCLEGWLQHLNFNCPLCRSPLLPHHHQGHGSDASISAFPLRSTSTASSH

SEQ ID NO: 314 - protein, 355 aa, Arabidopsis thaliana
MSTERRASSNPMTNEENAMFLDILHEAPLFGHRKSRSLVGSYLYMLLLAGYAILAAGAPWMFHRVQQLTPSLLCCCDVALLVVTGVFQQYFVYQVQKIRLQGYYSFSQKLKHVVRLPFAIAAYGTAAMLLVIVWRPQIHILSISSLQRIIMLVEAVGAGFFMGLYIGYVHQYNSVNSRPDVLKSLYSPLQPSSSMEGLRYYEGRLSDQQTALLQYQRENLHFLSEEILCLQEKLSKYEQSDDGSTPQVDLAHLLAARDQELRTLSAEMNQLQSELRLARSLIAERDAEVQRVNSTNNQYIEENERLRAILSEWSMRAANLERALEVERMSNSELQKEVASTRRKQMLETTTSEQP

SEQ ID NO: 315 - protein, 214 aa, Arabidopsis thaliana
MWAPDIYEGSPTPVTAFLSIAPKISISANILRVSIYGSYGATLQQIFFFCSIASMILGALAAMAQTKVKRPLAHSSIGHVGYIRTGFSCGTIEGIQSLLIGIFIYALMTMDAFAIVSALRQTRVKYIADLGALAKTNPISAITFSITMFSYAGIPPLAGFCSKFYLFFAALGCGAYFLAPVGVVTSVIGRWAAGRLPRISKFGGPKAVLRAPDT

SEQ ID NO: 316 - protein, 407 aa, Arabidopsis thaliana
MVDWSTLPKDLLDLISKSLESSFDLIQFRSVCSSWRSAAEPKSPLPTHHLPILPDNGGSLFPDSAVGFRLSQRSILLIKPHEPCIESDSFGWLIKVEEDLNVPRKVTLLDPLCDTRNSIPENFPRVLDMSKFKVRELGREFKLHYFNTVGDIVESLYLEKAVVKYLDCDGDYKFVLLTIHVSGKLAVFRSWDRAWTVINDMPSPYDDVMLFDGRFFAVDNNGRTVVVDYSSLKLTLVASPVFGGDKKFLIESCGEMLLVDMYLSLEAVEGDPGFVEEIFEHPAFYMNERTVKFKVYRFVEREESWVDVYDLEDKMLFLGDDSTFSASASDILPLCDGSSVFFNGNVFNGEDLGAMQDRDLGVFDFRSGKIELVQKLPEYAKLFWPPPPWITSHARAEDHIGETSSQS

SEQ ID NO: 317 - protein, 70 aa, Arabidopsis thaliana
MTVDEWRLLDVSTAFGSGENSVPDFGESADDDAVVVWLVKGEEAVEKLSEIVFGVNLVLENHLKHGLSEI

SEQ ID NO: 318 - protein, 70 aa, Arabidopsis thaliana; identical to SEQ ID NO: 317

SEQ ID NO: 319 - protein, 67 aa, Arabidopsis thaliana
MFVIGVVMVLLAVLPAVLPPLPPPPMILMGIPVVLMLMLIYLAIYYPPHQAHFLSSSSFDTTSRHVM

SEQ ID NO: 320 - protein, 290 aa, Arabidopsis thaliana
MALRIRKATTTLLFSGGITHGTDRIARTGALLSRWISSASSSSAVVADDESSGIYGLGSVLKEYEDYRRSLYGEITHKALLVDAVGTLLVPAQPTAQIYKNIGEKYGVEYSEAEILTRYRRAYQKPWGGSHLRYVNDARPFWQYIVTASTGCSDSQYFEELYSYFTTEQAWKLCDPDAGKVFKAIKEAGVKVAIVSNFDTRLRPLLRALRCEDWFDAVAVSAEVEAEKPNPTIFLKACELLEVNPEDAVHVGDDRRNDVWGARDAGCDAWLWGSEVTSFKQVAQRIGVKV

SEQ ID NO: 321 - protein, 299 aa, Arabidopsis thaliana
MMEIDLQKTFTWKIENFSGRKFPITSTVFSSGGCECYVLIRPKGDGFEDYLSLYLCVGNPKSLQPGWKRRASLHFIVLNQSGKEVHRTSERYGLFGPEIPGWGFRTALPLTKLQDRELLENNTLFIEVYIKVTEVVHEGDETRKDMLDFKGFNVLSSQIASVSPIFAKYPKFADDIKPTSKAVKTVYLKILLGLIKTVNKPPEIFSETELIKAYSSLIDLMEVGFRVKWLKSKLDEISLARKKKVDADAARVQELEGKVKNQVELDKEKTKSHVEPKMLSFKDYASPVSPWIPRRKRSD

SEQ ID NO: 322 - protein, 329 aa, Arabidopsis thaliana
MEAPPPSSDPYKFLNITLNSDGSLTRHRDFPKLPPTEQSKDIPLNQTNNTFIRIFKPRNIPPESKLPILVYFHGGGFILYSAASAPFHESCTKMADRLQTIILSVEYRLAPEHRLPAAYEDAVEAILWLRDQARGPINGGDCDTWLKDGVDFSKCYVMGSSSGGNIVYNVALRVVDTDLSPVKIQGLIMNQAFFGGVEPSDSESRLKDDKICPLPATHLLWSLCLPDGVDRDHVYSNPIKSSGPQEKDKMGRFPSTLINGYGGDPLVDRQRHVAEMLKGRGVHVETRFDKDGFHACELFDGNKAKALYETVEAFMKSCSSTGPSSNSNM

SEQ ID NO: 323 - protein, 185 aa, Arabidopsis thaliana
MGLIPQPQESIQESHYYTHKLFLTANYVLLGASSSCIFLTLSLRLIPSLCGFFLILLHATTIAAAVSGCAAASYGKNRWYAAHMIATVLTAIFQGSVSVLIFTNTSNFLESLNSYVREKEASMILKLAGGLCVVIFCLEWIVLVLAFFLKYYAYVDGDNNGVAMKRTGKVQSEETLKNSPWAFQV

SEQ ID NO: 324 - protein, 499 aa, Arabidopsis thaliana
MGEKTNSRYLGVIITRKSIIFLFISIITVLSWFFIFSSTNPNRVLDHISVSESTDVPLIIIKNSNSSPQNNAPKPQNREGAETEEPIKENRGGTKTESSMNQNRGETLRCIQRVSPSPRPLKVYMYDMSPEFHFGLLGWKPERNGVVWPDIRVNVPHHPGGLNLQHSVEYWLTLDLLFSELPEDSRSSRAAIRVKNSSEADVVFVPFFSSLSYNRFSKVNQKQKKSQDKELQENVVKYVTSQKEWKTSGGKDHVIMAHHPNSMSTARHKLFPAMFVVADFGRYSPHVANVDKDIVAPYKHLVPSYVNDTSGFDGRPILLYFQGAIYRKAGGFVRQELYNLLKEEKDVHFSFGSVRNHGISKAGEGMRSSKFCLNIAGDTPSSNRLFDAIASHCIPVIISDDIELPYEDVLNYNEFCLFVRSSDALKKGFLMGLVRSIGREEYNKMWLRLKEVERYFDLRFPVKDDEGDYAVQMIWKAVARKAPLVKMKVHRFQRFTRPF

SEQ ID NO: 325 - protein, 316 aa, Arabidopsis thaliana
MATFHTVRDAVKLFDAGISGGKHLNKGQEEGVLVEETNLCLWNKEVNKLKEKIKNAVKTKIEALLELEEAKKTVEQLSQELGIKRNMINDEKDLDLSSSVRVVTSELGVAKESIHRVAEEESELCMLMESLKLELQNVEKAHSELKEIEQRERDHQAIEDLKKETKDAKTQLSLLEEELKIAVFEAQEAKDAEEHARERLNVAVLESDFRSLAVVKESAAEELTETEALRACRDETLKTLEMSEREIEDIKAATQDALKKAEMAQEATIVVDVELKRRRKAASRILAESKMCAKSTKEVLKSKPRSSSKEGCLVKC

SEQ ID NO: 326 - protein, 327 aa, Arabidopsis thaliana
MATVTEMPTDVVVVDDVKEVSTKSEKIIDEGIEKSSITDSKTETESRLDMHKLVAMFKKLNPLAKEFFPSYYDPKKNNQVAKANQFLPADDFETTKKQSGEEFDLDAKKDDNTRKRRNYSQGRRRLTGRISKAQREDSIRRTVYVSDIDQSVTEEGLAGLFSNCGQVVDCRICGDPHSVLRFAFVEFADDQGAHEALSLGGTMLGFYPVRVLPSKTAILPVNPTFLPRSEDEREMCTRTIYCTNIDKKVSQADVRNFFESACGEVTRLRLLGDQLHSTRIAFVEFALADSALSALNCSGMVVGSQPIRVSPSKTPVRPRITRPPSTN

SEQ ID NO: 327 - protein, 672 aa, Arabidopsis thaliana
MMPPNEQESSFPKTPSANRHETSPVQENRFSSPSHVNPCLDDDNDHDGPSHQSRQSSVLRQSLRPIILKFEELTYSIKSQTGKGSYWFGSQEPKPNRLVLKCVSGIVKPGELLAMLGPSGSGKTTLVTALAGRLQGKLSGTVSYNGEPFTSSVKRKTGFVTQDDVLYPHLTVMETLTYTALLRLPKELTRKEKLEQVEMVVSDLGLTRCCNSVIGGGLIRGISGGERKRVSIGQEMLVNPSLLLLDEPTSGLDSTTAARIVATLRSLARGGRTVVTTIHQPSSRLYRMFDKVLVLSEGCPIYSGDSGRVMEYFGSIGYQPGSSFVNPADFVLDLANGITSDTKQYDQIETNGRLDRLEEQNSVKQSLISSYKKNLYPPLKEEVSRTFPQDQTNARLRKKAITNRWPTSWWMQFSVLLKRGLKERSHESFSGLRIFMVMSVSLLSGLLWWHSRVAHLQDQVGLLFFFSIFWGFFPLFNAIFTFPQERPMLIKERSSGIYRLSSYYIARTVGDLPMELILPTIFVTITYWMGGLKPSLTTFIMTLMIVLYNVLVAQGVGLALGAILMDAKKAATLSSVLMLVFLLAGGYYIQHIPGFIAWLKYVSFSHYCYKLLVGVQYTWDEVYECGSGLHCSVMDYEGIKNLRIGNMMWDVLALAVMLLLYRVLAYLALRNL

SEQ ID NO: 328 - protein, 239 aa, Arabidopsis thaliana
MMMYCPNLTASLTIPSYLPFCHYTRQFRPSHFRSSDKNPNLVSIIRAKPRISHSLRCFVSSSMATPPPTQSSETKPYSVLFVCLGNICRSPAAEGVFRDIVKKRGLDSKFNIDSAGTIDYHEGNMADPRMRSAAKRRGIEITSLSRPIKASDFREFDLILAMDDQNKEDILKAYNVWKARGNFPPDADKKVKLMCSYCKKHNDKFVPDPYYGGAQGFEKVLDLLEDACESLLDSITAQS

SEQ ID NO: 329 - protein, 214 aa, Arabidopsis thaliana
MTEKQHDQASMREEAVLPEVVVAHYECETWGLPRSLSSYISSFITHKFNTQFPNVTLAVAYTHVGLILISSGNKLLTYYVANPISRQCVEIPQPPPTVGYFLTSGLVTKLEDHVVLGYKVVLMDTSNLDDVISLLIYSSETGLWSFKTLQSHLTLSGLIDYNPVSLYGNLYWIGYNNDYGEVVVFHDFYATGTESDRCQVTPFPDGGTKPPNLK

SEQ ID NO: 330 - protein, 116 aa, Arabidopsis thaliana
MQDSKIPPFSEAKRMKIPTPKQPLTQLPPRIGKKVSNRSKSNQVHAISHQLEMSPNSDSSPGNEYRALRRKYLLLEEDSFALERELKEAEDEVKALEDEKLELLDKLVVMEGLVDP

SEQ ID NO: 331 - protein, 358 aa, Arabidopsis thaliana
MAKELAEKAKEAFLDDDFDVAVDLYSKAIDLDPNCAAFFADRAQANIKIDNFTEAVVDANKAIELEPTLAKAYLRKGTACMKLEEYSTAKAALEKGASVAPNEPKFKKMIDECDLRIAEEEKDLVQPMPPSLPSSSTTPLATEADAPPVPIPAAPAKPMFRHEFYQKPEEAVVTIFAKKVPKENVTVEFGEQILSVVIDVAGEEAYHLQPRLFGKIIPEKCRFEVLSTKVEIRLAKAEIITWASLEYGKGQSVLPKPNVSSALSQRPVYPSSKPAKDWDKLEAEVKKQEKDEKLDGDAAMNKFFSDIYSSADEDMRRAMNKSFAESNGTVLSTNWKEVGTKKVESTPPDGMELKKWEY

SEQ ID NO: 332 - protein, 163 aa, Arabidopsis thaliana
MKYCKVELRFINQRKLSPSQPNSVLVFIETKSEEIFVNPTTGHQTSRSTPASPSFFDTINLCSSSHHHIRSLLRSRFVSYHFLCDILAPEIATEAINLGFGRNGFTFTVVVTVTNRTVSVTSNDTEIIENGSTREDKSRGIKEFEHGNRVVFHLFPRSLQSET

SEQ ID NO: 333 - protein, 277 aa, Arabidopsis thaliana
MPIGWVKSLHCKSKAFDDVYHHHSNKGKLLLPSYSCRKNVRDVVNTQPGTVKKNPKPDPSLRRLCSSRRPELDSNSHHPTRRSVSARASSESVLPVLTDLPDGHPSRNVVEIIFQSSWSSDEFPGRVEMIFKVENGSKAVTRFEEYREAVKSRSCSKVDSDRVDGSACDENARCSADGNEMMRFFPLGPIPGGINGGAWGFPGGKGAAVCTFSGSGEAHASTGGGGGRRAMLICRVIAGRVAKKGEFGSDSVAGRAGELIVFDARAVLPCFLIFFRL

SEQ ID NO: 334 - protein, 71 aa, Arabidopsis thaliana
MTRGSQRERDRERAAARAGGKGKNGDDGLTPEQRRERDGKALQEKAAKKAAQAAGASSGGAAGGKGAAAKK

SEQ ID NO: 335 - protein, 803 aa, Arabidopsis thaliana
MEEYLNLMLKAREILVSESHEEVAMVIDHLFKRQDSEEYKTSRALYDICVSCNPGCLTLKLLKVYQSSSSGILRLRSISQLSETLTYLKNQIVFSKFSLDSLYEIKPLLILCLTMQETKESDIKILRKIVSFVTYNVVELHKDKWDELGDCILSLASSKEPVKAFHVFIDLPPVYKSFIGKFLDKILEEASNVFLYPYRVEDWSLALQTFVKMWIQLEKTGVTVELLMALMEIWISSVVNSVKKLVEMKKEQFLVRGLEDFESFFSGDMNLYHYTKDQFHFVLASMNEIEGVVGTETKEIVRKIKMLVTEPYDDLKNRREEFERGWYDILKDLSSLEVLKILASSELEDRSKEIAIRRLNVLLSDHTSKKVQIDISEMRQLQPLLISCLKEEGLSFNSMFKVLGEVVNHVAYEMLIYQEETWYELRDYIASSKTEFHRAVYIFQCLTMALIDDDFVIPVMENLFLEIITRLDPPRELLVDNSSWVLAFMGGFCLAIHLIEMSSKAESVKEIAHKMIDSIRELMEREMEVGLVKRGFRDVESIVKKQLEWYTMGGHGGLNILPQKRWNVYNFDNREKVRKEEEAAAREEQIKREEARKRDAESRLEVLRNVRGLAPLKRASPEAEKGKDEAVVAAAVVKSTAVVVESVESEEPKTGHINLFEGIRIFDPIEIKKNDKPADEEDQRRKKMRKEAAATARASAKDAAARAGDPDEEKYRLGYGVAGKGVKRPWYLEKRNDENDSVRGEDDDGGCGGYEAKKKKMSGKKSLKELREERLKRERVEKERERALFMKQSQRAGGFSRRR

SEQ ID NO: 336 - protein, 207 aa, Arabidopsis thaliana
MGGGSRFQEPVRMSRRKQVTKEKEEDENFKSPNLEAERRRREKLHCRLMALRSHVPIVTNMTKASIVEDAITYIGELQNNVKNLLETFHEMEEAPPEIDEEQTDPMIKPEVETSDLNEEMKKLGIEENVQLCKIGERKFWLKIITEKRDGIFTKFMEVMRFLGFEIIDISLTTSNGAILISASVQTQELCDVEQTKDFLLEVMRSNP

SEQ ID NO: 337 - protein, 151 aa, Arabidopsis thaliana
MATSGTYVTEVPLKGSAEKYYKRWKNENHVFPDAIGHHIQNVTVHEGEHDSHGSIRSWNYTWDGKEEVFKERREIDDETKTLTLRGLEGHVMEQLKVYDVVYQFIPKSEDTCIGKITLIWEKRNDDSPEPSGYMKFVKSLVADMGNHVSKT

SEQ ID NO: 338 - protein, 237 aa, Arabidopsis thaliana
MSSQICRSASRAARSLLSSAKNARFFSEGRAIGAASVVHATGKVPQYASNFGKSGSGFVSNSWITGLLALPAAAFMLQDQEALAAEMERTFIAIKPDGVQRGLISEIITRFERKGYKLVGIKVMVPSKGFAQKHYHDLKERPFFNGLCNFLSSGPVVAMVWEGEGVIRYGRKLIGATDPQKSEPGTIRGDLAVVVGRNIIHGSDGPETAKDEISLWFKPEELVSYTSNAEKWIYGQN

SEQ ID NO: 339 - protein, 434 aa, Arabidopsis thaliana
MEEVSPAIAGPFRPFSETQMDFTGIRLGKGYCNNQYSNQDSENGDLMVSLPETSSCSVSGSHGSESRKVLISRINSPNLNMKESAAADIVVVDISAGDEINGSDITSEKKMISRTESRSLFEFKSVPLYGFTSICGRRPEMEDAVSTIPRFLQSSSGSMLDGRFDPQSAAHFFGVYDGHGGSQVANYCRERMHLALAEEIAKEKPMLCDGDTWLEKWKKALFNSFLRVDSEIESVAPETVGSTSVVAVVFPSHIFVANCGDSRAVLCRGKTALPLSVDHKPDREDEAARIEAAGGKVIQWNGARVFGVLAMSRSIGDRYLKPSIIPDPEVTAVKRVKEDDCLILASDGVWDVMTDEEACEMARKRILLWHKKNAVAGDASLLADERRKEGKDPAAMSAAEYLSKLAIQRGSKDNISVVVVDLKPRRKLKSKPLN

SEQ ID NO: 340 - protein, 354 aa, Arabidopsis thaliana
MELQGEESKTATYCVTGASGYIGSWLVKSLLQRGYTVHATLRDLAKSEYFQSKWKENERLRLFRADLRDDGSFDDAVKGCDGVFHVAASMEFDISSDHVNLESYVQSKVIEPALKGVRNVLSSCLKSKSVKRVVFTSSISTLTAKDENERMRSFVDETCKAHVDHVLKTQASGWIYVLSKLVSEEEAFRYAKERGMDLVSVITTTVSGPFLTPFVPSSVQVLLSPITGDSKLFAILSAVNKRMGSIALVHIEDICRAHLFLMEQPKAKGQYICCVDNIDMHELMLHHFSKDYLCKVQKVNEDEEERECMKPIISSKKLRELGFEYKYGIEEIVDQTIDASIKIKFPTLNHKLRQ

SEQ ID NO: 341 - protein, 314 aa, Arabidopsis thaliana
MGVREKDPLAQLSLPPGFRFYPTDEELLVQYLCRKVAGYHFSLQVIGDIDLYKFDPWDLPSKQTCFTFVGEYNCNYLGKALFGEKEWYFFSPRDRKYPNGSRPNRVAGSGYWKATGTDKIITADGRRVGIKKALVFYAGKAPKGTKTNWIMHEYRLIEHSRSHGSSKLDDWVLCRIYKKTSGSQRQAVTPVQACREEHSTNGSSSSSSSQLDDVLDSFPEIKDQSFNLPRMNSLRTILNGNFDWASLAGLNPIPELAPTNGLPSYGGYDAFRAAEGEAESGHVNRQQNSSGLTQSFGYSSSGFGVSGQTFEFRQ

SEQ ID NO: 342 - protein, 293 aa, Arabidopsis thaliana
MAQPMRFMLNHIETESYGAFTPQNLSPLINRAIPHTRAQISGSPVVAVGRGSSGRTFFGVNVELPGLPLDHSIHAEQFLLANLALHFEQKLECIAISTNGYYFQEPCGHCCQLLHKIRDMSDTKILLTNPTGQKGTYMNLSTFLPQGLISQANVPRLLERNFNCIELINHSLYMDICSYSEHCNHLNCRALKAATISYAPDSKCPSGVALIDHRGKVYSGGYMESVAHNTSLGPVQAALVDFVANGDGQEFKNIVEAVLVEKKCGVLSQEATARMILEKIADPDCIFRVLHCK

SEQ ID NO: 343 - protein, 100 aa, Arabidopsis thaliana
MAGEEDWRKTADTTKMSSEGVKAAGVESSKRPPGSNPGGVLHQRRNLPYSYTTMALAGLAISGAIMYTVMYAKKKPEATATDVAKAATGTAKPEDTHPRK

SEQ ID NO: 344 - protein, 868 aa, Arabidopsis thaliana
MAEKVSEDVMLLHGDLDLKIVKARRLPNMDMFSEHLRRLFTACNACARPTDTDDVDPRDKGEFGDKNIRSHRKVITSDPYVTVVVPQATLARTRVLKNSQEPLWDEKFNISIAHPFAYLEFQVKDDDVFGAQIIGTAKIPVRDIASGERISGWFPVLGASGKPPKAETAIFIDMKFTPFDQIHSYRCGIAGDPERRGVRRTYFPVRKGSQVRLYQDAHVMDGTLPAIGLDNGKVYEHGKCWEDICYAISEAHHMIYIVGWSIFHKIKLVRETKVPRDKDMTLGELLKYKSQEGVRVLLLVWDDKTSHDKFGIKTPGVMGTHDEETRKFFKHSSVICVLSPRYASSKLGLFKQQASPSSSIYIMTVVGTLFTHHQKCVLVDTQAVGNNRKVTAFIGGLDLCDGRYDTPEHRILHDLDTVFKDDFHNPTFPAGTKAPRQPWHDLHCRIDGPAAYDVLINFEQRWRKATRWKEFSLRLKGKTHWQDDALIRIGRISWILSPVFKFLKDGTSIIPEDDPCVWVSKEDDPENWHVQIFRSIDSGSVKGFPKYEDEAEAQHLECAKRLVVDKSIQTAYIQTIRSAQHFIYIENQYFLGSSYAWPSYRDAGADNLIPMELALKIVSKIRAKERFAVYVVIPLWPEGDPKSGPVQEILYWQSQTMQMMYDVIAKELKAVQSDAHPLDYLNFYCLGKREQLPDDMPATNGSVVSDSYNFQRFMIYVHAKGMIVDDEYVLMGSANINQRSMAGTKDTEIAMGAYQPNHTWAHKGRHPRGQVYGYRMSLWAEHLGKTGDEFVEPSDLECLKKVNTISEENWKRFIDPKFSELQGHLIKYPLQVDVDGKVSPLPDYETFPDVGGKIIGAHSMALPDTLTT

SEQ ID NO: 345 - protein, 179 aa, Arabidopsis thaliana
MKEDDALPTTTTTGTATGTAMANSKKESSDSVLFGRGRYKFWAFAAILLLAFWSMFTGTVTLRLSTGNLNRLSEDLGIPNYDNLDVLEMEEREKVVKHMWDVYTNSRRIKLPRFWQEAFVAAYEELTSDVPGVREAAIGEIAKMSARSITLDPPPSRSMSARDLGRNLKRILHKPAASS

SEQ ID NO: 346 - protein, 548 aa, Arabidopsis thaliana
MSSSSNPPVCSPEKEERSEMKIEIQCMENKQPLAASCSSASEGSGCFFLKSPEIATPATVSSFPRRTSGPMRRAKGGWTPEEDETLRRAVEKYKGKRWKKIAEFFPERTEVQCLHRWQKVLNPELVKGPWTQEEDDKIVELVKKYGPAKWSVIAKSLPGRIGKQCRERWHNHLNPGIRKDAWTVEEESALMNSHRMYGNKWAEIAKVLPGRTDNAIKNHWNSSLKKKLEFYLATGNLPPPASKFIVLKDIADGDRDSKQSSATKPFKDSDSLTQTSSGNTDSNEVGRDHFDSSSALLEEVAASRRIGVNEYACSPVEYKPQLPNLEPISEEVRINSKAYFERSIQRKVENGFGTPKHGNLYYKSPLDYYFPSEADLQHMYGYECGCSPGAASPVSLMTTPCNKDSGLTATRSPESFLREAARTFPNTPSIFRKRRKVVLAAKTDAVVVVNGVVKEVDRKEESKDMRKSLLLETTDNCSDDEELGLNGNAFNLSPPYRLRAKRTAVIKSRQLEFTSEKEKQPDNEIEFTSAKEKQPDNEIKTSEEDKPV

SEQ ID NO: 347 - protein, 226 aa, Arabidopsis thaliana
MDLIPQQLKAVTLTHVRYRPGDQLGHFLAWISLVPVFISLGGFVSHFLFRRELQGIFFGIGLVISQFINEFIKTSVEQARPETCTLLEACDSHGWPSSHSQFMFFFATYFSLMGCKGIGFWFGLRSRWIMNLLHWSLAVVTMYSRVYLGYHTVAQVFAGAALGGIVGASWFWVVNSVLYPFFPVIEESVLGRWLYVKDTSHIPDVLKFEYDNARAARKDMDSAKSD

SEQ ID NO: 348 - protein, 148 aa, Arabidopsis thaliana
MDQVLYSSYIIKIPVISRISPSQAQLTTRLNNTTYFGLSSSRGNFGKVFAKESRKVKLISPEGEEQEIEGNEDCCILESAENAGLELPYSCRSGTCGTCCGKLVSGKVDQSLGSFLEEEQIQKGYILTCIALPLEDCVVYTHKQSDLI

SEQ ID NO: 349 - protein, 386 aa, Arabidopsis thaliana
MASSSCLNLFFFSFLSALIISKSQISDSVNGVVFPVVKDLPTGQYLAQIRLGDSPDPVKLVVDLAGSILWFDCSSRHVSSSRNLISGSSSGCLKAKVGNERVSSSSSSRKDQNADCELLVKNDAFGITARGELFSDVMSVGSVTSPGTVDLLFACTPPWLLRGLASGAQGVMGLGRAQISLPSQLAAETNERRRLTVYLSPLNGVVSTSSVEEVFGVAASRSLVYTPLLTGSSGNYVINVKSIRVNGEKLSVEGPLAVELSTVVPYTILESSIYKVFAEAYAKAAGEATSVPPVAPFGLCFTSDVDFPAVDLALQSEMVRWRIHGKNLMVDVGGGVRCSGIVDGGSSRVNPIVMGGLQLEGFILDFDLGNSMMGFGQRTRSDSTSL

SEQ ID NO: 350 - protein, 462 aa, Arabidopsis thaliana
MAVSSFAVLPPFGSSYSSTTDRSSSSSFYSSSKLLRISQYRFQSNSRCPNVFVSCSLNQPSDDASDAALFLESNSIADYMRFKRRPDPGNGTSELQTAIVSYKKRFPWILLNPFLQVDLVSTIHIADKEYFTTLQKELEPYDSILYEMVASKETLENRRNPIASKRLKSSRSRGFSILGFIQRQMARVLTLDFQLDCLDYDTENWYHADLDFETFQLLQKEKGESFFSFARDMTIRSTKAMIQPALVTEGRDTWRSKLLWVSRVFPMPLVGLFLIGAFCADFGDQTSDYPELEALSRLDFGAAMKVFLAKRLTSELTLETSDIEEKSVIIGERNRAATEALRRAIEQGHKRIGILYGGGHMPDLGRRLREEFDLVPSEVRWVTAWSIRNPTDLETSSYPILRKMAEALRWPLNRYQTLALLIFSSVLALDLCFWELFFGSTIDWATQIGAELYQFIDNTKIV

SEQ ID NO: 351 - protein, 151 aa, Arabidopsis thaliana
MKISLFLLSILILLPISLQDPTPEVKKPTRAHAELTNHGFPIGLLPLSVKDYFLNQTSGDFSLFLNGACKITLPPDNYIATYSNKVTGRISQGKIAELQGIRVRAFFKSWSITGIRSSGDNLVFEVAGITAKYPSKNFDESLDCEGKRSSS

SEQ ID NO: 352 - protein, 251 aa, Arabidopsis thaliana
MNFLDLPEECIATMISFTSPFDACRISAVSKLLRSAADSNTTWERFLPSDYRMYIDNSLSRFSNKQLFLRFCESPLLIEDGRTSFWMEKRSGKKCWMLSARKLDIVWVDSPEFWIWVSIPDSRFEEVAGLLMVCWFEIRGKISTSLLSKATNYSAYLVFKEQEMGSFGFESLPLEVSFRSTRTEVYNNRRVFLKSGTQESREDGWLEIELGEYYVGFDDEEIEMSVLETREGGWKGGIIVQGIEIRPKELL

SEQ ID NO: 353 - protein, 99 aa, Arabidopsis thaliana
MSEKLVFRSTSGGDYYGAPYGEYMEKRQLFLRSYQFSRKQSFAEKVSRSVTRVKRVVLTRLRSAPKLKRVVWSRLRSAFYYRRRRFFRLLHLHEPCYCF

SEQ ID NO: 354 - protein, 405 aa, Arabidopsis thaliana
MASVGIAPNPGARDSTGVDKLPEEMNDMKIRDDKEMEATVVDGNGTETGHIIVTTIGGRNGQPKQTISYMAERVVGHGSFGVVFQAKCLETGETVAIKKVLQDRRYKNRELQTMRLLDHPNVVSLKHCFFSTTEKDELYLNLVLEYVPETVHRVIKHYNKLNQRMPLIYVKLYTYQIFRALSYIHRCIGVCHRDIKPQNLLVNPHTHQVKLCDFGSAKVLVKGEPNISYICSRYYRAPELIFGATEYTTAIDVWSAGCVLAELLLGQPLFPGESGVDQLVEIIKVLGTPTREEIKCMNPNYTEFKFPQIKAHPWHKIFHKRMPPEAVDLVSRLLQYSPNLRSAALDTLVHPFFDELRDPNARLPNGRFLPPLFNFKPHELKGVPLEMVAKLVPEHARKQCPWLGL

SEQ ID NO: 355 - protein, 413 aa, Arabidopsis thaliana
MSENCNSRHFSWLMKSCLPNPSDAKSLVQIHQPSSTAANSSATIASLPDDLLLECISRVPSSSIPSLAVVCRRWSRLLHSPYFLHLRRRLGLLRHSLFAISTVDSGLFAADLQFQSEIASWKVSLAVSSRSVGVDGSYGSLSHARAAAIGPRVYVVSRNAVLRYDSWMGTLNLRSPMIFPRKKFAIAVVSGKIYVAGGGGGSEVAAAVEEYDPELNRWEVVTQSARKRYGCIGAAVDGVFYVIGGLKIGNETSRAVAARAYASSMDLFDVESRQWLRSRSVPGGGCVVAACAAVGYVYVLTSHAVELSFWRFDARRRGGNSGFGEWQRLKSPPLPAQVRLDGTVRFSCVGVEDKVAVVQVVGCIDDLLRRSGRGERGIRESLVLLYDTTEGEWRRAADLPEMITRAACACVEW

SEQ ID NO: 356 - protein, 369 aa, Arabidopsis thaliana
MALVQRIPISSSSIRNWQQARTNLTPICCLHYNTASSSSSPFTEKHSVERYQRDQWLYKAVEPTPPSTPSPSPFEDEVFVRENDIASQLPELKKLLAVLKEKRVKGCKGGDCGPGDVYLVGTGPGDPELLTLKAVRVIQSADLLLYDRLVSNDVLELVAPDARLLYVGKTAGYHSRTQEEIHELLLNFAEAGATVVRLKGGDPLVFGRGGEEMDFLQQQGIRVQVIPGITAASGIAAELGIPLTHRGVATSVRFLTGHSRKGGTDPLFVAENAADPDTTLVVYMGLGTLPSLAQKLMDHGLPSDTPAVAVERGTTPLQRTVFAELKDFATEIQSAGLVSPTLIIIGKVVELSPLWPHCTKESSCLVETR

SEQ ID NO: 357 - protein, 375 aa, Arabidopsis thaliana
MDLSNRRNPLRDLSFPPPPPPPIFHRASSTGTSFPILAVAVIGILATAFLLVSYYVFVIKCCLNWHRIDILGRFSLSRRRRNDQDPLMVYSPELRSRGLDESVIRAIPIFKFKKRYDQNDGVFTGEGEEEEEKRSQECSVCLSEFQDEEKLRIIPNCSHLFHIDCIDVWLQNNANCPLCRTRVSCDTSFPPDRVSAPSTSPENLVMLRGENEYVVIELGSSIGSDRDSPRHGRLLTGQERSNSGYLLNENTQNSISPSPKKLDRGGLPRKFRKLHKMTSMGDECIDIRRGKDEQFGSIQPIRRSISMDSSADRQLYLAVQEAIRKNREVLVVGDGGGCSSSSGNVSNSKVKRSFFSFGSSRRSRSSSKLPLYFEP

SEQ ID NO: 358 - protein, 375 aa, Arabidopsis thaliana; identical to SEQ ID NO: 357

SEQ ID NO: 359 - protein, 453 aa, Arabidopsis thaliana
MDQKSKTIGEQWWRSNPTFKPPETPLDSMEFLSRTWSASATEVSRAVVASPPTSQPPQMRFSEIQNGSSDVTLVPEDEENGIVLGNTFSFASSETSLMVMERIMAQSPEISSPRTSGRLSHSSFTDSPPISPSDIDDFKQFYRVSPSFNGHIRGSSAIPGTAGGSKTVGRWLKDRREKKREETRAQNAQLHAAVSVAGVAAAVAAIAAATASQSSSGTDEQVAKNDSAVASAATLVAAKCVEAAEIMGADREHLASVVSSAVNVRSAGDIMTLTAAAATALRGAAQLKARALKEVWNIAAVIPVDKGTPKGGGGGYRGGELAPVDNFLGICSKELLAKGCELLKRTRKGDLHWKVVSIYINRTKQVILKTKSKHVAGTITKKKKNVVVGLVKGLPAWPGREMLEGGENLRYFGLKTVEKRVIEFECKSQREYDLWTQGVSMLLSIASDRKHKC

SEQ ID NO: 360 - protein, 166 aa, Arabidopsis thaliana
MGEPLGLLQVTVIQGKKLVIRDFKSSDPYVIVKLGNESAKTKVINNCLNPVWNEELNFTLKDPAAVLALEVFDKDRFKADDKMGHASLSLQPLISVARLRHVVRVSSGETTLRKVLPDPENCVSRESTISCIDGEVVQSVWLRLCAVESGEIELKIKLIDPPGTNK

SEQ ID NO: 361 - protein, 242 aa, Arabidopsis thaliana
MFNISYAKRNAKYLFKLLAWCMMIEEAGPNIGNKQKVVLQLSKMLIMYIILHINAAFWTWRGYLKRCVLHFVFPRIFLPLLSDSPTITQAKKPSYCFAMDVGGEDISDLQVDQIVEEYSMDDLIRDRFRLSAISIAEAEAKKNGMEIGGPVVACVADLAFKYAENVAKDLELFAHHAGRKVVNMDDVVLSAHRNDNLAASLRSLCNELKAKEPQSERKRKKGSAKKEDKASSSNAVRITTDL

SEQ ID NO: 362 - protein, 242 aa, Arabidopsis thaliana; identical to SEQ ID NO: 361

SEQ ID NO: 363 - protein, 668 aa, Arabidopsis thaliana
MIRGLLLGIIWMIFCVCSSFQQETPFVYNNFGHVDHLHLDGSARIIPSGGILQLTNATNSQIGHVFYEKPIEFKSSESVSFSTYFVCALLPAGDPSGHGMTFFVSHSTDFKGAEATRYFGIFNRNGSTSTRVLAVELDTSLASDVKDISDNHVGIDVNSAESITSANASYFSDKEGKKIDIKLLSGDPIQVWVDYEGTTLNVSLAPLRNKKPSRPLLSSTSINLTDILQGRRMFVGFSGSTGSSMSYQYILGWSFSKSMASLPNIDISKLPKVPHSSTKKKSTSPVLSVLLGLIAFIVLGILVVAYLYRRNLYSEVREEWEKEYGPIRYSYKSLYKATKGFNRSEFLGRGGFGEVYKGTLPRSRELREVAVKRVSHDGEHGMKQFVAEIVSMRSLKHRSLVPLLGYCRRKHELLLVSEYMPNGSLDHYLFNHDRLSLPWWRRLAILRDIASALSYLHTEADQVVIHRDIKAANVMLDAEFNGRLGDFGMSRLYDRGADPSTTAAVGTVGYMAPELTTMGASTGTDVYAFGVFLLEVTCGRRPVEPGLPEAKRFLIKWVSECWKRSSLIDARDPRLTEFSSQEVEKVLKLGLLCANLAPDSRPAMEQVVQYLNGNLALPEFWPNSPGIGVLSPMALSPAPLVIPSLSFSSSSSNNSMFITHSVLYGSGR

SEQ ID NO: 364 - protein, 327 aa, Arabidopsis thaliana
MSEPSPIADPYAYLNIVNNPDGSITRDLSNFPCTAATPDPSPLNPAVSKDLPVNQLKSTWLRLYLPSSAVNEGNVSSQKLPIVVYYHGGGFILCSVDMQLFHDFCSEVARDLNAIVVSPSYRLAPEHRLPAAYDDGVEALDWIKTSDDEWIKSHADFSNVFLMGTSAGGNLAYNVGLRSVDSVSDLSPLQIRGLILHHPFFGGEERSESEIRLMNDQVCPPIVTDVMWDLSLPVGVDRDHEYSNPTVGDGSEKLEKIGRLRWKVMMIGGEDDPMIDLQKDVAKLMKKKGVEVVEHYTGGHVHGAEIRDPSKRKTLFLSIKNFIFSVL

SEQ ID NO: 365 - protein, 327 aa, Arabidopsis thaliana; identical to SEQ ID NO: 364

SEQ ID NO: 366 - protein, 180 aa, Zea mays
MEAVVATTTTRVSFPLLPTAGRPLLPPVLARPRRGFASVSATSTSGAGGGGGRSSAGGCGGDGGGDDSGAGAAAAAAAVAALGESEQQEDGDSDAIVLHVGGMTCGGCADKVKRILESQPEVAAATVDVEKATAIVWTTPEAKATKDWQKQLAEKLANHLTSCGFQSHLQDEGEAEQTDA

SEQ ID NO: 367 - protein, 259 aa, Zea mays
MAEQQPPHSPYPAVQVQRPGPPAGHSRQAGSASASPHSPSPVVQGDYYGTAAAAATSSGEPSPRSSGKHAFYRGIRCRSGKWVSEIREPRKARRIWLGTYPTPEMAAAAYDVAARALRGADAVLNFPGAIASRAAPASASPADIRAAAAAAAQAQLEYSQSQGAASNPLAAAAAQGRHQQQHHGASSTATADAAGYTAPQQEMGTDEFMDEEAIFEMPQLLRNMAAGMMMSPPRLSPDTSDESPDPSEAGESLWSYHDP

SEQ ID NO: 368 - protein, 528 aa, Zea mays
MAFLAPPQFKWPLSTRAAAVFREPTGGAGSRPSRINCSFSSTAVVDAECLSVGPPPSPHRTLPGCFGEALLNKEAVVAAAAAEAVALARAAAEVAGEVARMAQNDHPAALPPRDDTVDSFLSREVLRSEVGLDARRAGLVEMLEGEEHSSIFSDESEDDDDGGHSIAVTVKSARRSERRARRVRAAMKTAKCSSSMKPVGASSTRRKRLKGCLTPLGCLYKMTGPRLLTAEQEVEFSEGIQDLLKLEAIQKEVAQYNAGEPTFSQWAAAAGTDENTLRRRLNHGVYCKNRMVKSNVRLVISIAKEHEGPGMEFSDLIQDGMQGLIRGAEKFDASKGFRFSTYSHWWIKQAIRKSVLEQTQIIRLPAHMAEASSRVKECCRRLGRELKRLPSNEEIAVDTGMTIRRVEAAMSLPKYSVSFTSKVGCTDVTYQEIMPDTSAETAEETLHRWLMKKDVNTALDSLSPREKQVMRYRFGIEGGRARTLHDIGQLMGVSRERIRQIELGAFRKLRSKNRLQSLQHYLRPAESW

SEQ ID NO: 369 - protein, 319 aa, Zea mays
MTLDQNHAMPMQPPALQPGRKKRPRRSRDGPTSVAAVIQRWAERNKHLEYEESEEAKRPRKAPAKGSKKGCMKGKGGPDNTQCGYRGVRQRTWGKWVAEIREPNRVDRLWLGTFPTAEDAARAYDEAARAMYGDLARTNFPGQDATTSAQAALSSTSAQAAPTAVEALQTGTSCESTTTSNHSDIASTSHKLEASDISSYLKEKCPAGSCGIQDGTPIVADKEVFGPLEPITNLPDGGDGFDIGEMLRMMESDPHNAGGADAGMGQPWYLDELDSSVLESMLQPEPEPEPEPFLMSEEPDMFLAGFESAGFVEGLERLN

SEQ ID NO: 370 - protein, 609 aa, Zea mays
MDQLALLATELGDSSDFEVEGIQNLTENDVSDEEIEPEDLARRMWKDRVRLRRIKERQHKLALQQAELQKLRPKPISDQAMRKKMSRAHDGILKYMLKLMQVCNARGFVYGIIPDKGKPVSGASDNIRAWWKEKVKFDKNGPAAIEKYESDNLVSATAQSGGTKSQHSLMDLQDATLGSLLSSLMQHCDPPQRKYPLEKGASPPWWPSGKEEWWTALGLPSGQVPPYKKPHDLKKVWKAGVLTGVIKHMSPNFDKIRNHVRKSKCLQDKMTAKESLIWLGVLQREESLVHRIDNGVSEITQRSMPEERIADTNSSSNEYDVYGFEDAPVSTSSKDDEQDLSPVAQSAVEHVPKRGRERAYNKRPNQIVPGKAKEPPKRKRTRHSSTVTEPDAHRVVDAPENSRNLIPDMNRLDQVEIPGTSNQIVTFDHGGTTTEALQHRGDAQVQVHPPGAEVNSFYSAPTANPTPISIYMGDQPIPYQNNDSTRPRSENSFPVDAHTGLNNLPSSYQNLPPKQSLPLPMMDHHVVPMGIRAPTDSIPYGDHILGGGNSTSVPGDMQQLIDFPFYAEQDKFVGSSFEGLPLDYISISSPIPDIDDLLHDDDLMEYLGT

SEQ ID NO: 371 - protein, 169 aa, Zea mays
MAATTSQASLLLQKQLRDLAKHPVDGFSAGLVDDSNVFEWQVTIIGPPDTLYDGGYFNAIMSFPENYPNSPPSVRFTSEMWHPNVYSDGLVCISILHPPGEDPSGYELASERWTPVHTVESIVLSIISMLSSPNDESAANIEAAKEWRDKREDFKKRVRRIVRKSQEML

SEQ ID NO: 372 - protein, 172 aa, Zea mays
MDEKDWLSLVAVHSDAWLLAVAFYFGARFGFDKESRKRLFVMINNLPTIYEVVTGTAKKQTKEKTPKSSSKSNKAGPKPPRQPEPNSRGSKMPPPKDEDDSGGEEEEEEEDHENTLCGSCGDNYGQDEFWICCDACETWFHGKCVKITPAKAEHIKHYKCPNCSGSGKRARA

SEQ ID NO: 373 - protein, 277 aa, Zea mays
MLLMLHETLPFVRPTSSCRDPKLSEKSASAFHGKLGCSAVCSSAEGYRVQKPHIVHSYKVSFTRTSHHLCKSLNERTTRHCLHRFHVNASPDDDDFRSSRNIAISLFKRYKNVIDRGGGENLNEFVSAGVTAYALGCTDEGLRKELMDIEDSGLEIEGLGSLGGTSLKFKVHSFEIRECILWLSIVFVTILCTPQLTVIRWSPNPPVSADVLHQWKGFCALIANAYYVKGMAWLPVKTLQLEQMAVTGSSEKPSVVASRMQLVFSTLEVVSPQWPRV

SEQ ID NO: 374 - protein, 409 aa, Zea mays
MAAYLSMGEAQRRIGDYLSRVTNAISCSDAAALASLLSVSSAPASTPLSDALAAIPDFPRLAGDRYPDLADLLVPLLRAIHFHSIQRFADAYSSFEKASNAFLQEFRNWETPWAMEAMHTVALEIRLIAEKADRELATNGKNPDKLQAAGSFLMKVFGTLAVKGPKRIGALYVTCQLFKIYFRLGTVNLCRSVIRSIETARNFDFEDFPVKDKVTYMYYTGRLEVFNENFLVADQKLTYALMHCNPQSESNLRRILKFLIPVKLSIGVLPKRTLLERYSLLEYADVVTALKRGDLRLLRQALDRHEDQFLKSGVYLVLEKLELQVYQRLVKKIHIIQRQKEPAKAHQIKLDVVVKALKWLEIDMDVDEVECIMACLIYKNLIKGYFAHKSKVLVLSKQDPFPKLNGKPV

SEQ ID NO: 375 - protein, 506 aa, Zea mays
MAPVLPASAWWSWIAVLAVVLAVGVRPPPRCRGEFTVVVPDTSAAALVDAPQTGFSDRARTDPAEQRAVQEVMAATGNGWAWAIPDVCRGRWHGIECVPDRRDTYHVVSLAFGALSDDTAFPACEAASATLSPAVLALPHLRSLFFYRCFTGNPQPVAALLGRLGPAFRSLVLRQNGHVGPIPAELGNLKELRVLDLHGNQLTSAVPATLQSLSHLQLLDLSYNRLAGPVPRFEFPRLSILDLSHNALQGGVPWSLGQCRSLLKIDLSQNRLTGTIPDALGDLSQLMLLDLSHNALSGPIPAALSRLASLRSLILSDNRMQFSTLPDDFFAGLKALTTLVLSGMGLAGAIPESIGELSELRVLRLDNNQFTGVIPASFRRLERVSELRVDGNRLVGPIPFGKEMMWRLGKKLRVGSNEGLCYDTKQQGLEGVVALAGVADCDSVRSRTTQHLVWSNSTVVSRGGGVYTVTSSAASASRNSGGGTRVETWLVFVCLHLAWFVACNCK

SEQ ID NO: 376 - protein, 689 aa, Zea mays
MGAVDYIYLSGNSLTGNIPGWLLRRNKIADISFNNFTMGSSGPSQCLQGSVNLVESYSAEVNRLNSIHPCLKRNFPCVASNGQYHSSLHINCGDKEATINGTKYEADTTPKGASLLYVSPGLNWAFSSTGNFMDDNINDDNYIATSASKLAVPNSDLYNKARLSPLSLTYYGLCMLSGSYTVNLHFAEIVFTNDSTYYSLGKRRFNVFIQGRMVLEDFDIEQSSGAAAKPVTKTFQTYVTNHTLEIQFYWAGRGTTGIPYRGSYGPLISAISVTPNFQIPLAVDPPKAGSREKRSSRASIALGIGIPIVAIFTALILGIYCIKKQRKSSMHEELRALDLQIGSFTLRQIKAATRNFDAANKIGEGGFGSVYKGLLSDGTIIAVKQLSSRSKQGNREFVNEIGMISALQHPNLVKLYGCCTEGNQLSLVYEYMENNCLARALFVEQYRLRMDWGTRHKICLGIAKGLAYLHEESAIRIVHRDIKASNILLDKDLNAKISDFGLAKLNEDDHTHISTKVAGTIGYMAPEYAMRGYLTDKADVYSFGVVVLEIVSGKSNTNYRPKEDFVYLLDWACVLHERGTLLELVDPDLGSNYSTEEALLMLNVALLCTTAAPTLRPKMSKVVSLLEGSAPLQPLLSDLSLAANSLSSSGVRRNFWQNPGESQSLTAQASCSDTNESSTIDIDGILLVS

SEQ ID NO: 377 - protein, 762 aa, Zea mays
MAILSALATEVLIPVAAVIGIAFAVVQWVVVSRVKLSPAASGGSGGKAGYADSLIEEEEGLNDHNVVVKCAEIQNAISEGATSFLFTEYQYVGIFMAIFAVVIFLFLGSVEGFSTKSQPCTYSKDKYCKPALFTALFSTVSFLLGAITSLVSGFLGMKIATYANARTTLEARKGVGKAFITAFRSGAVMGFLLASSGLVVLYITINVFKLYYGDDWEGLFESITGYGLGGSSMALFGRVGGGIYTKAADVGADLVGKVERNIPEDDPRNPAVIADNVGDNVGDIAGMGSDLFGSYAESSCAALVVASISSFGIDHDFTGMCYPLLVSSVGIIVCLITTLFATDFFEVKAVKEIEPALKKQLIISTVLMTFGIALISWLALPAKFTIYNFGTQKEVSNWGLFFCVSIGLWAGLIIGFVTEYYTSNAYSPVQDVADSCRTGAATNVIFGLALGYKSVIIPIFAIAVSIYVSFSIAAMYGIAVAALGMLSTIATGLAIDAYGPISDNAGGIAEMAGMSHRIRERTDALDAAGNTTAAIGKGFAIGSAALVSLALFGAFVSRAGVKVVDVLSPKVFIGLIVGAMLPYWFSAMTMKSVGSAALKMVEEVRRQFNTIPGLMEGTAKPDYATCVKISTDASIKEMIPPGALVMLTPLIVGTLFGVETLSGVLAGALVSGVQIAISASNTGGAWDNAKKYIEAGASEHARTLGPKGSDCHKAAVIGDTIGDPLKDTSGPSLNILIKLMAVESLVFAPFFATQGGLLFKYL

SEQ ID NO: 378 - protein, 148 aa, Zea mays
MEAVVVDAGSKLLKAGIAAPDQAPPLVMPSKMKLDVEDQEMADGAVVEEVVHPVVRGFVKDWDAMEDLLNYVLYRDIGWEIGDEGQILFTEPLFTPKTLREQLVQLMFEKFNVSGFYASEQAVLSLYAVGRISGCTVDIGHGKIGYNN

SEQ ID NO: 379 - protein, 144 aa, Zea mays
MSAANQLAALVSNMYATGLLDDQFQQLQLLQDPSAPDFVSEVVTLFCQDGERIIEELAKLLEKPNVDFDRVDAFVHQLKGSSANIGAQKVKNTCIQFREFCQQKSRDGCLKVLETMRINFYELRGKFQTMLQLERQVNGFPPNK

SEQ ID NO: 380 - protein, 157 aa, Zea mays
MGISSMPEPRDSLLGYLVYNTVISIAALAGLVRAALVFLDLQAALPPGDDGGDRLAASAPGLAERFLRAFRPALYEVLASTATTCEADGGGGGDDCSVCLAGFRARAVVNRLPCGHLFHRACLETWLRYERATCPLCRAHVPLPADETPLLRYPEFE

SEQ ID NO: 381 - protein, 282 aa, Zea mays
MGSPSSLPAAAALVLLALLAGAQCREAQFDAADAGAENFNTSEAAVYWGPWQKARATWYGQPNGAGPDDNGGACGFKHTNQYPFMSMGSCGNQPLFKDGKGCGSCYKIRCRKDPSCSGRTETVIITDMNYYPVSKYHFDLSGTAFGRLAKPGLNDKLRHSGIIDIEFTRVPCEFPGLKIGFHVEEYSSPVYFAVLVEYEDGDGDVVQVDLMESKTARGPPTGRWAPMRESWGSIWRMDTNHRMQPPFSIRIRNESGKTLVARNVIPANWRPNTFYRSFVQYS

SEQ ID NO: 382 - protein, 245 aa, Zea mays
MSSMATKLFNTAEVESSDAQALVADMRKAIGTMKSLAVDFERDGKSDKVKKLEETVLELVASYEDCAAMAQAIKAVPGVYQSSDQPTDFKTLIGVEASKIREASSASQQNHPLFRQFRESVWNVHHAGQPMPGEEQEDIVMTSTQMSILNVTCPLTGKPVIELMNPVRCVDCKHIYEKDPVMQYIRTKKPPQCPIAGCPRVLERGKVICDPFLLIEIEELRSSETAAPNATNIDDWTDLNDEDEE

SEQ ID NO: 383 - protein, 331 aa, Zea mays
MVVLAKPPVVDQIPLLRSPGPRDSFSGVPVVDLSSHGAARAIVDACERFGFFKVVNHGVAAATMDRAESEAVRFFAQAQADKDRAGPAYPFGYGSKRIGLNGDMGWLEYLLLAVDAASLSDACPVPSSAAFRSALNEYVAAVRKVAARVLEAMAEGLGIADADALSSMVSGAGSDQVFRVNHYPPCPALQGLGCSTTGFGEHTDPQIISVLRSNGTSGLQIALRDGAQWVSVPSDRDAFFVNVGDSLQVLTNGRFRSVKHRVVTNSLKSRVSFIYFAGPPLGQRIAPLPQVLAEGEESLYKEFTWGEYKKAAYKTRLGDNRLAQFEKRSNI

SEQ ID NO: 384 - protein, 331 aa, Zea mays; identical to SEQ ID NO: 383

SEQ ID NO: 385 - protein, 325 aa, Zea mays
MAANAGGGGAGGGSGSGSVAAPAVCRPSGSRWTPTPEQIRMLKELYYGCGIRSPSSEQIQRITAMLRQHGKIEGKNVFYWFQNHKARERQKRRLTSLDVNVPAAGAADATTSQLGVLSLSSPPSGAAPPSPTLGFYAAGNGGGSAGLLDTSSDWGSSGAAMATETCFLQDYMGVTDTGSSSQWPCFSSSDTIMAAAAAAARVATTRAPETLPLFPTCGDDDDDDSQPPPRPRHAVPVPAGETIRGGGGSSSSYLPFWGAGAASTTAGATSSVAIQQQHQLQEQYSFYSNSTQLAGTGSQDVSASAAALELSLSSWCSPYPAAGSM

SEQ ID NO: 386 - protein, 892 aa, Zea mays
MMQQLRHSQPSPCLCGLRAARPMLALGAAASRSRPAGKLQPSVCLGLGHVAPAAARGQPRPRAVADSALGASPTSVHVGGKLLLQNFAADSQQRLKLSIQLVSATVADPDGRGVKAEASVLDAVVGSGDSELDVDLIWDEALGAPGAVVVKNHSDFPVYLRLLSVPAGVGGADDEAAAVHFACNGWVYPVDKHPYRLFFTNDACVKEETPSALLKYREDELGALRGDGETTERPFQPWDRVYDYALYNDLGNPDLRQDLARPVLGGSQEYPYPRRTKTGRPAAKTDPRSESRAPLDEEIYVPCDERVGFASIPAPTLPPLGGHFRSLADVYRLFGLDDLGRLPEAKAVINSGAPFPVVPQVISVNPTHWRKDEEFARQMIAGANPVCIKRVTKFPLASELDRGVFGDQDSKITKDHVEKNMGGMTVQQAVEEGRLYVVDHHDWVMPYLKRINELPASEEKAEVSQRKVYAARTLLFLDGEDSSMLRPLAIELSSPHPEKEQLGAVSTVYTPPDSGDDGITAGRFSTWELAKVYASANDAAENNFVTHWLNTHASMEPIVIAANRQLSVLHPIHRLLKPHFRKTLHINAVARQIIVGSGDQRKDGSVFRGIDEVTYFPSKYNMEMSSKAYKAWNFTDLALPNDLIKRGLAKGDPKKPETVELAIKDYPYAVDGLDMWAAIKKWVADYCAIYYADDGAVARDSELQGWWSEVRNVGHGDLADAPWWPAMDCVADLVETCATVVWLSSAYHASISFGQYDYLGFVPNGPSITTRPVPGPDAGAEVTESDFLASVTPVTEALGFMSIASGPMGLKGTEVYLGQRPDTEQWTRERRAAEALAEFRARLEEVAGNIDRRNADPALKNRTGQVEVPYTLLKPTAQPGLVLRGIPNSITV

SEQ ID NO: 387 - protein, 241 aa, Zea mays
MIKANPDSMLPPGFRFHPTDEELIVNYLRNRAANTPCPVAIIADVDIYKLDPWDLPSRAAYGDKEWYFFSPRDRKYPNGVRPNRAAGSGYWKATGTDKPIHGSATGGSVVGVKKALVFYKGRPPKGAKTNWIMHEYRLAAADAHAAHSYYRSMKSRNASMRLDDWVLCRIYKKASHVPPMAVPPLSDHEQDEPCGFDENPYGATTSAAVLLQGASCPALQAAAGVQRMPRIPSLTELFSDP

SEQ ID NO: 388 - protein, 314 aa, Zea mays
MAGQVMEAQACRLQPPTMAPFAPLPHQYNNTCKHLNTTMAATSGNNNSNGSTATAAGGAAADGMAAYLQHLQQAGAEAAAKSGGGGGAARGEQCPRCASRDTKFCYYNNYNTSQPRHFCRACRRYWTLGGSLRNVPVGGSTRKRPRLAHHHQHARLAPPAPHVFGLTPMMPPPLQPSSSTSSSQGQGQGQGQSGGLLGSLFALGAAGAGPPLLEGRGAGSSFDFDLGLGLPTGALHLGAAGQMQGLGLMGGGGASAAGSSSFLWPAAGLLVDNDSVDTWKMPGAAAGSMWPDFSFPAAAAPQTAGLLHGGGHLM

SEQ ID NO: 389 - protein, 287 aa, Zea mays
MCMVVSACRRDSFITHRAFCDALAEESARAVTAAAAVVVGQQQAAGGGDGSAGLHLPPDVLDPSQTLGGGHGMSLQELCLKREQQQQFAPSSWLTAHHQQELPGSARLLEQHEYIGSSTPESTAGLSGFVGLSPSAAGEAAASAHMSATALLQKAAQMGATLSRPSNQEQMASTHSHSSTTNAGTGSASAAAAAAINVPGTGAGAFGFGAPHHFGAEERTTTSADRDACGNAAAVSVVGANDGFTRDFLGLRAFSHGDILTMAGFDPCMSSAAYEQGHHQSSKQWHV

SEQ ID NO: 390 - protein, 88 aa, Zea mays
MASLTDLVNLDLSDCTDRIIAEYIWVGGSGIDLRSKARTVKGPITDPSQLPKWNYDGSSTGQAPGEDSEVISLKPFSRTRSGRVTTSL

SEQ ID NO: 391 - protein, 699 aa, Zea mays
MASVYTAPRAPLPTVASSSSSARQVDPNPSGSRFLAGRRLRVVRRLAGAAPSRRAPWVCYSARSPDADAGDEQRRRGWDAMLHDAFQGAVRRWSEYVSNYWPLPPSVKEAGTGKRVGSSYDEEVMNGDEEEMKVGEEEGKWSWERWKRHFALIEESERLVDELQLQLQASVYREDYRSAHKLRLAIATIVKNDTVGRAVSDLNMAIDEERYKDAAYIRDHAGTGLLGWWSGISGNLSDPYGLIIRISAEHGRYVARSYDTRQLTSDSSGLPIFEIYFAEANGGYNLQAVHLKPDDSDSDQVPNMLREKLGMDSINISSSSVGSKHEEFDGSVNMDDKDSDDSNIDAGPGSKDLSSDPTAVPRIKILKVVPMQNVDKDYIINIFDQISEENDDPEVENESSEDAGDEDNSGVAETVSAEENGDESGDESDIEPLVSIDFVIENNDDYASHPSAEAFERMPARLEKRDRFSFSFYTEEYSKKLDAGKAQQTSKKTVRLHTDQQDYDGFVELDRVKLSGSNKKLSILQLGIKRNNKVQKKLHGVTHFSRIQMPISSDPLTGLYLTASGFDSEILSLQRKFGQWREDGPSEEHSDLLFYEYVEAVKLTGDNLMPAGQVVFRAKVGEHYRLPHKGIIPRELGVIARYKGQRKIADPGFQNPQWVDGELLILDGKFIRDGPVIAFFYWTSNVHLFEFFRQLKLPD

SEQ ID NO: 392 - protein, 1293 aa, Zea mays
MTYLPLLENPPSAAKNIQSEIASSLGRTHANPAEGGNGLKSWTNNDDLRKDAAEALCCLAHALGEDFTIFIPSIRKILVKHHLRYRKWDEIENRLLRRELLITENLSVQKYTQCPPDVIRDPLDDCDGTPSEIADDTQRQARSHQVNDVRLRSAGEASQRSTREDWAEWMRHFSIALLKESPSPALRTCARLAQLQAEFMEHDEKPLPIDTRLLGALAEKCRAFAKALHYKEMEFEAVCTKKMGANPVTVVESLIHINNQLQQHEAAIGILTYSQQNSEVQLKESWYEKLHRWDEALKAYTVKSSQTSGPFTKLGCYIRSNEVSSSFGSAANAAWHMGEWDHMADYVSRLDDADENKLRMLGNATASGDGSSNGAFFRAVLLVRYKKYDDARMYVERARRCLATELAALVLESYERAYNNMVRVQQLSELEEVIDYCTLPMESPIADGRRELIRNMWNERIKGTKRNVEVWQALLAVRELVLPPNEDRDTWIKFAELCWKNGRISQARSTLVKLLQFDPESSPELTLYHAHPQVALAYLKYQYAVGDELKRRDAFSKLQELSVQVATTMGNLPGTSANHGTMSNAGVPLIARVYLTLGSWKKALSPALDDDSIQEILISYHNATLSAKDWGKAWHIWALFNTEVMSRYTFRGRPDIAGKYVVAAVTGYFYSIACASTTKGVDDSLQLYFDQRKNNSAGEGKTALPDILRLLTLWFNHGDTSEVQTALQKGFSLVKIEMWLVVLPQIIARIHSNNRVVRELIQSLLVRIGKGHPQALMYPLLVACKSISILRQRAAQEVVDKIRQHSGGLVDQAQLVSKELIRVAILWHEMWHEALEEASRMYFGEHNIEGMLAVLEPLHAMLERGDETIKENAFIQAYGHELLEAHECCLKYRATGEDAELTKAWDLYYHVFRRIDKQLPSLTTLDLHSVSPELLKCRKLELAVPGTYAAGHEDLRQDERVMQLFGLVNTLLENSRKTSEKDLSIQRYAVIPLSPNSGLIGWVPNCDTLHALIREYRDARKIFLNQEHRLMLAFAPDYDHLPLIAKVEVFQHALQNTEGNDLAKVLWLKSRTSEVWLERRTNYARSLAVMSMVGYLLGLGDRHPSNLMLDRYSGKILHIDFGDCFEASMNREKFPEKVPFRLTRMLVKAMEVSGIEGTFRTTCENVMQVLRTNRDSVMAMMEAFVHDPLINWRLFNFNEVPQVSNYGNVHAHTVVSSEEAVANRELMQPQRGARERELLQAVNQLGDANEVLNERAVAVMARMSDKLTGRDFSSGSALAGAGGVRSGELSWKQ

SEQ ID NO: 393 - protein, 357 aa, Zea mays
MASLTDLVNLDLSDCTDRIIAEYIWIGGTGIDLRSKARTVKGPITDPSQLPKWNYDGSSTGQAPGEDSEVILYPQAIFKDPFRKGNHILVMCDCYTPQGEPIPTNKRYSAAKVFSHPDVAAEVPWYGIEQEYTLLQKDVSWPLGWPVGGYPGPQGPYYCAAGADKAFGRDVVDAHYKACLYAGINISGINGEVMPGQWEFQVGPSVGISAGDEIWVARYILERITEMAGIVLSLDPKPIKGDWNGAGAHTNYSTKSMREAGGYEVIKAAIDKLGKRHKEHIAAYGEGNERRLTGRHETADINTFKWGVANRGASIRVGRDTEREGKGYFEDRRPASNMDPYVVTGMIAETTILWNGN

SEQ ID NO: 394 - protein, 670 aa, Zea mays
MDLLRHPFKGVVTDIKGRATWYKHDWVAGLHSGFRILAPTMYIFFASALPVIAFGAQLSTATNGILSTVETLASTAICGIIHSILGGQPLLIVGVAEPTIIMYTYLYNFAKNHQALGEQLYLAWTGWVCIWTAIMLFLLATFNASNVISRFTRIAGELFGMLITVLFLQEAIKGMISEFSVPEDADSSSPIYQFQWLYVNGLLGVIFSIGLLYTALRTRRARSWLYGTGWFRSFIADYGVPLMVIVWTGLSYLHPGKVPSGVPRRLSSPLPWESSSLGHWTTARDLFSVPPAYIFGAILPAFMVAGLYFFDHSVASQLAQQKEYNLKKPSAYHYDILVLGFVVLLCGLLGIPPSNGVLPQSPMHTKSLAVLKRQLLSKKMVDTAKESIGGSATSLEIYGKMEEVFIKMDSEQNTDSVDRELKNFKDAVLQEGDEEGRLAREFDPRKHIEAHLPVRVNEQRLSNLLQSILVGGCVGAMPVIRMIPTSVLWGYFAYMAIDSLPGNQFWERIQLLFITESRRYKVLEGPHASFVESVVPKTVTIFTIFQLVYLLICFGITWIPIAGILFPVPFFLMIVIRQYLLPKFFDPVVLRELDAAEYEELDGVPLEHKLEDEASEVGSCPSRPDAEILDELTTNRGELKHRSSSLREERPIQVTVSTHMVASSAVQPSL

SEQ ID NO: 395 - protein, 1246 aa, Zea mays
MGHSSRKKKKRGAAGRKAAKDHAAQLEGDETALDEELTALASILGEDFKVTSESPHTRCNICIRPYSDDMGFEDLNISAILIVICFPGYPHKCPKLRILPEKNLSKEDTDRLLSLLIDQANIYSREGRVMIFNLFEAAQEFLSEIAPARVSVSTASFLGLSSTTDDNVEVGFDSDPYLGISYIYNSFDLYSQLYDDTYWSRQGSDLTTDSGRKNIVSQVQSNVRSKRKTIIEKSHISADKVNNAKESSGDKAEQQHATKHGAIREAAPTLHVVDEETEIYGKSLSASNTGNTSDTPERGFSSLNEPEDTDLADESWNEQDCDSDFSSSNALPYVSYMLDDASRNKKRDLVLVHLLRIACASKDSLSSALPTISAELCNIGVLSEWAKDLISDSPAVFGETFSHVFGQQMISSECSLFWRPDNSSSKPNSRYLNDFEELRSLGQGGFGRVALCKNKLDGRQYAVKKIRLKDRSPQLNEKILREVATLSRLQHQHVVRYYQAWIETEYGHHNILNAGGSCTAESSIFSYDEVSLSDAGGGNKQESTYLYIQMEYCPRTLRQDFETYISSFDVDHAWHLFRQIVEGLAHVHSQGILHRDLTPSNIFFDVRNDIKIGDFGLAKFLKLEQLDHDQYLPTEALGVSMDGTGQVGTYFYTAPEVEQKWPQINEKVDMYSLGVIFFELWHPFATAMERHLVLSDLKQKGDPPLSWESKFPRQSVLLRSLLSPSPSNRPSAVEVLQNELPPRMEDEWLNDVLRMIRTPEDTYVYDRVISTIFNEDRFAKMQGQHDSSKKSTGNIDNSELLDTIVEVAKEVFKRHCAKRFQISPLHTLEWNFTKNRGNTVKILTQGGEMLELCYELRTPFVMSIASNQTSSFKRYEISWVHRRAVGHSTPYRFLQGDFDIIGGTSPIPEAEIIKVALDLGTRFYDSKTLVIRLNHGKLAEAICSWAGVSQDQRQNVAEFLSSTIVQYWPNEADRKSQWSLIRGQLLQDLRLSEEVVEKLHKADQRFCGSADLVLARLRGTLFYDESACKALDDLSALLRCLRVWSVEQPITTIDVLMPPSECYYTNLFFQVYSKEGNHGPGFHEKLLAVGGRYDWLVEQAWDETSKSKPPGAVGVSIALEKFLPNNPSSDLGLRRVEPSISVLVCSRGGGGLLTERMELVAELWKANIMAQFVPQEDPSLQEQYEYASEHDIKCLAIMTESGLSQTDLVKVRHLDFKKEKDVEREGLIKFLSDAMCSQYKNPTIWS

SEQ ID NO: 396 - protein, 317 aa, Zea mays
MAATVSSFPVVNMEKLETEERATAMEVIRDGCENWGFFELLNHGISHELMDEVERLTKAHYATFREAKFQEFAARTLEAGEKGADVKDVDWESTFFVRHLPASNLADLPDVDDRYRQVMEQFASEIRKLSERLLDLLCENLGLEPGYLKAAFAGSDGPTFGTKVSAYPPCPRPDLVDGLRAHTDAGGIVLLFQDDQVSGLQLLRGGEWVDVPPMRHAIVANVGDQLEVITNGRYKSVMHRVLTRPDGNRMSVASFYNPGADAVIFPAPALVGAAEEDRAEAAYPSFVFEDYMNLYVRHKFEAKEPRFEAMKSAIATA

SEQ ID NO: 397 - protein, 250 aa, Zea mays
MAKNYPTVSAEYSEAVEKARRKLRALIAEKSCAPLMLRLAWHSAGTFDVSSRTGGPFGTMKCPAELAHGANAGLDIAVRLLEPIKEEFPTLSYADFYQLAGVVAVEVTGGPEIPFHPGREDKPQPPPEGRLPDATKGSDHLRQVFGKQMGLSDQDIVALSGGHTLGRCHKERSGFEGAWTTNPLVFDNSYFKELLSGDKEGLLQLPSDKALLSDPVFRPLVEKYAADEKAFFDDYKEAHLKLSELGYADA

SEQ ID NO: 398 - protein, 485 aa, Zea mays
MVSMIADEKPQPQLLSKKAACNSHGQDSSYFLGWEEYEKNPYDPVANPGGIIQMGLAENQLSFDLLEAWLEANPDALGLRRGGASVFRELALFQDYHGMPAFKNALARFMSEQRGYRVTFDPSNIVLTAGATSANEALMFCLADHGDAFLIPTPYYPGFDRDLKWRTGAEIVPVHCTSGNGFRLTRAALDDAYRRAQKLRLRVKGVLITNPSNPLGTTSPRADLEMLVDFVAAKGIHLVSDEIYSGTVFADPGFVSVLEVVAARAATDDGVVGVGPLSDRVHVVYSLSKDLGLPGFRVGAIYSSNAGVVSAATKMSSFGLVSSQTQHLLASLLGDRDFTRRYIAENTRRIRERREQLAEGLAAVGIECLESNAGLFCWVNMRRLMRSRSFEGEMELWKKVVFEVGLNISPGSSCHCREPGWFRVCFANMSAKTLDVALQRLGAFAEAATAGRRVLAPARSISLPVRFSWANRLTPGSAADRKAER

SEQ ID NO: 399 - protein, 485 aa, Zea mays; identical to SEQ ID NO: 398

SEQ ID NO: 400 - protein, 306 aa, Zea mays
MLLPHSSSASATATTRGLALAAAAPPPRPTARPRRARLLPPRARAETHATGVGADRAAEALLQSGLRRESLPRHVAVVMDGNSRWARERGLTPADGHKAGGRNLERVVALSRAWGIRALTAFVCSRENLSRPKAEVDYMMGLSEWLIGDNIDKLSRQGIRLQVIGDAAKMPASLRSAAAQADEATRQNSQLHVMLAICYSGRWDMVQACRELAREAQANRLSPDDIDESIIAGKLATSAAGEFSCPDLVIRTSGEMRLSNFLLWQSAYSELFFTAKMWPDFGEAEYLEALRSFQGRDRRFGQSKLL

SEQ ID NO: 401 - protein, 538 aa, Zea mays
MGRWLGKRLWQIGDQRPRGVGPLAVARVKGRAATAAQVGEEAATLARREAVVLVRPAAPSVAPTTSLKPTGARALGMWLSFVVEGGVEYGNQGVGVVSQQLYKSLTSLQMGNVEDWMGDNSRDDLNRETNRSRCQCHWHSGWYGTQGKASASYPVHAGWHSGWYGNWYPGKVSPSSRLQQSLRARGENSNSQRSALILSLRCSAPGSPHQRSLPEQAMKLKINKACDLGSISVLPPRRTGGSGGAGGAGSSAAPVAAGSQQRSQPMSQHSFSQGVVGSGGASSLLHSQSQLSQASLDENLLTLHLASPARDQRFGFHDDLSKKMTSLPVSSASCVREESQLQLAKTSSNPVHRWNPSLPDGRSVGPTEDVERKFQHMASSVHKVGMVLDSVQTDVMQLNRAMKEATLDSGSIQQKIVLLDALLQKNLKGQDDLKALVESNTKSISDQLTVLNSYSNKLDEISSTLSILPKQIETNLKQQQSDTFRIFRKDMEEIVRAVRSLNNKIDAIQMPTVRIILYLASQSSIGISSLSFYVFHLD

SEQ ID NO: 402 - protein, 185 aa, Zea mays
MVGTGKRERIAIRRIDNLAARQVTFSKRRRGLFKKAEELSILCDAEVGLVVFSATGKLFHFASSSMKQVIDRYDSHSKTLQRSEPQSSQLQSHMDDGTCARLKEELAETSLKLRQMRGEELQRLSVEQLQELEKTLESGLGSVLKTKSQKILDEISGLERKRTQLIEENSRLKEQVNPCSLSPTF

SEQ ID NO: 403 - protein, 185 aa, Zea mays; identical to SEQ ID NO: 402

SEQ ID NO: 404 - protein, 791 aa, Zea mays
MVVIQGGIGPAGLSAEDLHVLDLKQQRPRWHRVVVQGPGPWKTTPGRCMALDTTAKPYEWRKLEPEGEGPPPCMEMETEVSARDVMAMKDHIDLEASQSQQPRKLPPKDLKEIAGSFWLVASMFSKKWQNWRGKQYNFGECKLCFCLSASVAISDLNHTLLQGSTNVGKSAFISAMLRTMAYKDPVAATAQKYKPIQSVVPGTTLGPIQIESFLGGGWHLACEPVEPVRRGSAAAVPDQRMLAAVASRTRNKSATTVLSLAMPFLLSAASASTTTNPHPLSPFPRSQNNSRVHRLQLPARRLPSFPAVAPGASFAPLPQRLGMASLAASAAAAAEVTHLTQRDAAEIDEQLMGPLGFSVDQLMELAGLSVAAALAEVYKLNEHARVLVICGPGNNGGDGLVAARHLYHFGYRPSICYPKRTPKPLYSGLVTQLESLSIPFIPVEDLPNELPREFDVIVDAMFGFSFHGTPRPPFDHLIQMLVSLSDIQNPDKRPAIVSIDIPSGWHVEEGDVDGGIKPDMLVSLTAPKLCAKKFTGPHHFLGGRFVPPPILNKYGLQLPPYPGTSMCVRIGKAPSVEISSLRENYISPELLESQVMSDPFDQFLKWFDEAVTAGLREPNAMALTTANKEGKPSSRMVLLKGVDKQGFVWYTNYGSRKAHDLCENPNAALLFYWNEMNRQVRVEGSVEKVPEAESDKYFHSRPRGSQLGAIVSKQSTVIAGREVLQQDYKKLEQKYSDGSLIPKPEYWGGYKLTPTLFEFWQGQQSRLHDRLQYSQREVDGSTVWHIERLSP

SEQ ID NO: 405 - protein, 391 aa, Zea mays
MADQQQPQQQPQEMDVDRTGGLELPPGFRFHPSDFEIINDYLTKKVHDRDYSCIAIADADLNKTEPWDLPKVAKMGEKEWYFFYQKDRKYPTGLRANRATEAGYWKATGKDKEVYNPFAAEGLLLVGMKKTLVFYKGRAPRGDKTNWVMHEYRLEGSGRLPASPASASGSATNIAAAMMKASASACKDEWVVCRVFNKTTGIKKTAAPAYQVAMAGPEMDQNQNNIPAIPIPMPLQLPLPVPMQMQFPILPDFAMDPVAPYYPNPNAGAGMMPPMALAGMGGAGGLQINGALFGNPVPAPLPMNFYHHQMGMGAAAGQVDMGAAAGQMDMGAAGAGAGGFDVAAPESRPSSMVSQKDEQANAAEISSMMSVTGPGSATTTIEMDGIWKYKY

SEQ ID NO: 406 - protein, 198 aa, Zea mays
MATGPRSLHALLGGGAVADLLLCRRRNASAAAVVGATAVWFVFERAGYSFPSVLSNALLLLVAILFFWAKSALLLNRPLPPLPNLEVSDAVVEKAADYALVWINRLLAVGHDIAIKRNRKVFIKVILILWLVSFVGMLFNFLTLIYIGVMLSLLVPPLYEKYQDQVDEKVGVAHSIISRHINTIVIRAGQSAKEKKTE

SEQ ID NO: 407 - protein, 152 aa, Zea mays
MCRGLPTPAPAPALQFQSQDCSRQQRGTTQAPPGRASESVRACMAAERKAASRPAACGRMRGAEGAKPRGRQAKAARAPPGQGYFTAGLAALFLCLTTLLVFLPLVLPPLPPPPLLLLLVPVGLMAVLLALALVPSDGRAAAAAVASSSCVC

SEQ ID NO: 408 - protein, 482 aa, Zea mays
MASSDHGSTTAPKDVPGSYGLPLVGAVRDRLDFYYFQGQDKYFESRVERYGSTVVRMNVPPGPFMARDPRVVAVLDAKSFPVLFDMDKVEKKDLFTGTYMPSTSLTGGYRVCSYLDPSEPTHTKVKQLLFSLLLSRKDDVIPTFRSNFSSLLATVEAELAKGGKAEFNKLNDVTSFDFIGEAYFGVRPSATELGKGGPSKAAKWLIWQLHPLVTLGLPMVLEEPLLHTFHLPPFLVKGDYRALYKYFSTVAKQALDTAEGLGLSREEACHNLLFATTFNSYGGLKVLFPGLLANVASGGEKLHERLVAEIRGAVADAGGKVTLAAVERMELAKSVVWESLRLDPPVKFQYGHAKKDLLVESHDAVFQVRKGEMLFGYQPCATKDPRVFGDTAGDFVPDRFLGEEGSKLLQYVYWSNGRETDNPSVDNKQCPGKNFVVLVGRLLLVELFLRYDTFTAEVGKELLGTSVIFTGVTKATSGPGSE

SEQ ID NO: 409 - protein, 246 aa, Zea mays
MARGRRSAARRRTRSPGGAGGRTARSGDAPGEAHGDSKYCEKHIHRGKSRSRKPVEVTSPAAYRPSAFSISPPRAADAPPPPPGLGHPQQQHLRHGALSPAGRAHAAGALQLHLDSSLHAASPPPSYHRYAHSHAHYTPPPPPSLYDYGQSKELREAAELRRRHFHALGADLSLDKPLADAGAAEKPLRRFFDEWPRERGDTRPSWAGAEDATQLSISIPAASPSSDHAASAAARCHNDGSDRCIS

SEQ ID NO: 410 - protein, 1258 aa, Zea mays
MDAPDVQQSMGYKESRGGMPKFFHALGPALLISMGYIDLGKWVAAVEAGSCFGFDLVLLALLFNFTAIVCQYLAACIGTVTGKNLAEICHQEYNQPTCIFLGVQAGLSLLTSELTMIFGIALGFNLLFEYDDLITGICFATVMEGTINACIAGFALLSYVLGLLVSQPQIPLTMNVIFPKISGESAYSLMALLGANIMAHNFYIHSSVVQGQKKSSAVGLGALFHDHLFSILFIFTGIFMVNYVLMNSAAAESTNTLLITFQDVVELMNQIFVNPLAPTIFLVVLLFSSHIISLTSAIGSQVISHHLFGINLPLSGHRLLLKVFAIVPTLYWAKVAGAEGIYQLLIICQIIQAMLLPSSVVPLFRVASSRSIMGAHRVSLHLEILVFLAFLLMLFSNIIFVAEMLFGDSGWMNNLKGYTGSPVVLPYTVLVLVALISVAFSLYLAVTPLRSGSHEAESHEWSVHSQRELLNTSQEREDVKVDNVTYEEDQRSDVVPSPRDVPDSHPELALDYIDTSDTAVESDHDSQQSTAYASTAPETCSSPSFTREESKSVVAVNWPEPLEKVPTSTVMEESTVENVVSRITTERDVLVETDVVSGKDKEDIRTLESEKSIVDSTPYVSDDGPPSLTFSRGKGSDAGNGSGSLSRLSGLGRAARRQLAATLDEFWGHLFDYHGKLTQEASTKKFGILLGIDLRTPSTSVRTDKQAAEILKSPLVRDSMRGAAFLSSSVDMMSPKNETSNLELAYGLQRGPGMGLSSWSQGMQLPNTQLQSSSNSLLEQSARLNSNFSSSYSDNNQFYQPATIHGYQLTSYLKQMNASPSLYSSMPLDPQRLPKSSVSAVPNYADSMMHARNHNLLASLGGTTTQLPATSRVGSMMPERSYYDPSSVDGNENAGSPAYSKKYHSSPDMSGIIAASRAALLNEAKLGAAIGPQSYLSRLAAERSQYASSTARPAAPLAFDELSPPKLQSDIFSAQSSMRPSARSLWAKQPFEQLFGMSSAELSKGDFNLPGRSGGVAKDDFSYKESETKLLQSLRLCIMKLLKLEGSGWLFKQNGGCDEDLIDRVAAAEKLLMQGTAENQLLLHGGDLQQHSSDQAGIQYMRTLPNCGEDCVWRASLVVSFGVWCVRRVLDMSLVESRPELWGKYTYVLNRLQGILDPAFSKPRGALTICTCLQKDTRVRNSPPHSGLTAMGPVPTPIRGAFTTAGVVLEMIKDVEAAVSGRKGRSGTAAGDVAFPKGKENLASVLKRYKRRLASKGQ

SEQ ID NO: 411 - protein, 766 aa, Zea mays
MAAAAILPELATQVLIPVAAAVGIAFAVVQWVLVSKVRVTPERRADGGAVKSGPSDYLIEEEEGLNDHNVVVKCAEIQTAISEGATSFLFTEYKYVGLFMGIFAILIFLFLGSVEGFSTKSQPCHYIKDQTCKPALANAIFSTIAFVLGAVTSLVSGFLGMKIATYANARTTLEARKGVGKAFITAFRAGAVMGFLLAASGLLVLYIAINLFGIYYGDDWEGLFEAITGYGLGGSSMALFGRVGGGIYTKAADVGADLVGKVERNIPEDDPRNPAVIADNVGDNVGDIAGMGSDLFGSYAESSCAALVVASISSFGINHEFTPMVYPLLVSSVGIIACLITTLFATDFFEIKAVDEIEPALKKQLIISTIVMTIGIALISWLGLPYTFTIFNFGVQKTVQSWQLFLCVAVGLWAGLVIGFVTEYYTSNAYSPVQDVADSCRTGAATNVIFGLALGYKSVIIPIFAIAFSIFLSFSLAAMYGVAVAALGMLSTIATGLAIDAYGPISDNAGGIAEMAGMSHRIRERTDALDAAGNTTAAIGKGFAIGSAALVSLALFGAFVSRAAISTVDVLTPKVFIGLIVGAMLPYWFSAMTMKSVGSAALKMVEEVRRQFNNIPGLMEGTTKPDYATCVKISTDASIKEMIPPGALVMLTPLIVGILFGVETLSGVLAGALVSGVQIAISASNTGGAWDNAKKYIEAGVSEHARTLGPKGSDPHKAAVIGDTIGDPLKDTSGPSLNILIKLMAVESLVFAPFFAAHGGILFKWL

SEQ ID NO: 412 - protein, 224 aa, Zea mays
MVRGKTELKRIENATSRQVTFSKRRNGLLKKAFELSVLCDAEVGLVVFSPRGKLYEFASAASLQKTIDRYRTYTRENVNNKTVQQDIQQVKADAVSLASRLEALEKTKRMFLGENLEECSIEELHNLEVKLAKSLHVIRGKKTQLLEQQISKLKEKERTLLQDNKELRDKQRNLQSPPEAPPDLNRCVPPWPRSLPAPSNDMDVETELYIGLPGRERSSNRDSD

SEQ ID NO: 413 - protein, 582 aa, Zea mays
MATPYRLPCCCYALVTVLVLFFSVDATEGAIREYQFDVQMTNVTRLCSSKSIVTVNGQFPGPTVFAREGDFVVIRVVNHVPYNMSIHWHGIRQLRSGWADGPAYITQCPIQSGQSYVYKFTITGQRGTLWWHAHISWLRATVYGPIVILPKPGVPYPFPAPYDEVPVLFGEWWTADTEAVISQALQTGGGPNVSDAFTINGLPGPLYNCSAKDTFKLKVKPGKTYMLRIINAALNDELFFSIAGHPLTVVDVDAVYIKPITVETIIITPGQTTNVLLTTKPSYPGATYYMLAAPYSTARPGTFDNTTVAGILEYEDPTSSPPPHAAFDKNLPALKPTLPQINDTSFVANYTARLRSLATAEYPADVPREVHRRFFFTVGLGTHPCAVNGTCQGPTNSSRFAASVNNVSFVLPTTALLQSHFAGKSRGVYSSNFPAAPLVPFNYTGTPPNNTNVSNGTKLVVLPYGTSVELVMQGTSILGAESHPLHLHGFNFFVVGQGFGNFDPAKDPAKYNLVDPVERNTVGVPAAGWVAIRFRADNPGVWFMHCHLEVHVSWGLKMAWLVLDGERPNEKLLPPPSDLPTC

SEQ ID NO: 414 - protein, 102 aa, Zea mays
MERVASSYCVSLLAQSRRAYTVAAAMAKKGAAARRVDEKKAAAALTKRVMGKKEVNTAAAAAAEEKAWVPDPVTGYYRPAGSAKEVDAAELRAKLLTEAAAN

SEQ ID NO: 415 - protein, 313 aa, Zea mays
MRMSCNGCRVLRKGCGDACTIRPCLQWIEAPEAQANATVFLAKFYGRAGLLNLLAAAPDDGVRPAVFRSLLYEACGRIVNPVYGSVGLLWSRQWHRCADAVEAVLRGDPVVQVDAGSDAAAAPPLLAGARPPPPAAFDIRHVPRDPDATAADLLRAGRKRFKRAGSSSNASKAKPLPLELEGKAGNNERASPSPPPTQQREAEELQPVPMVVEPEHGEESAGSHDHHLQLQGWSEEDTDVEAASHVSQAEAEPPASSQSQVLVADQEEEEVGLELTLGFEPVVRQQPRSSRCDKSGLSAASSLIGLRLQLPAA

SEQ ID NO: 416 - protein, 541 aa, Zea mays
MSGFLAVVGKVGTFLLWVLFLVLQTATRIVGSLLASSAEQQDDHHQESAAARRRSPPASPHPELYEPASASLAQLWDPPPLPHLAFAPAADESSSSSSLRRRASAPLPRADEDFVVPSSAYSRPTVGVAHTHSVSAPPLRAIETRAVPSRLVTAGGKRPRLERKYSKIVDQYRSLDEVIEALAQAGLESSNLIIGIDFTKSNEWTGKNCFNGMSLHNISDNPNPYEQAISIIGKTLSAFDEDNLIPCFGFGDASTHDQDVFAFYPDERPCNGFQEALARYREIVPHLRLSGPTSFAPIIDMATTIVEQSGGQYHVLVIIADGQVTRSVDTEFGQLSTQEQMTVDAIVQASQFPLSIILVGVGDGPWDMMKEFDDNIPARSFDNFQFVNFTAIMSKKISQSKKETEFALSALMEIPLQYKATLELGILGRRIGESPERIPLPPPFASYSTVSRAEPSRANSYRSVPSHPREEPAVNSTITASVTSPSAAESRVLEPQMCPVCLSKPRDMAFGCGHQTCSECGPQVTDCPICRRPIDTRVKLY

SEQ ID NO: 417 - protein, 188 aa, Zea mays
TVSPLATERSINTTAGINAAPLRPPPRPTLLRLLPTPILPLPEYEVLERERLSSKNGGWRRRRRRRGGGELRRQRRRRPRRIRRGAQEEARPVLRRRRQIHGDIDGASLVTNSNVIEDDDFQGKPTNSGTSKELSDDDGDLEENTDPANAKKMRRMVSNRESARRSRKRKQAHLTDLESQVSIVLEYR

SEQ ID NO: 418 - protein, 424 aa, Zea mays
MENLRSQNCHQGVAMEGVKFAPEKANTNRRALSDIKNIIGGPHQHLAVSKRALSEKPAAAAAANAKDQAGFVGHRPVTRKFAATLATQPTVALLDPIGSERLKRNADTAFHTPADMESTKMTDDSPLPMVSEMDEMMSPELKEIEMEDIEEAAPDIDSGDAGNSLAVADYVDEIYRFYRKTEGASCVPTNYMSSQTDINEKMRGILIDWLIEVHYKLELLEETLFLTVNIIDRFLARENVVRKKLQLAGVTAMLLACKYEEVSVPVVEDLILICDRAYTRADILEMERRIVNTLNFNMSVPTPYCFMRRFLKAAQSEKKLELLSFFMIELSLVEYEMLQFCPSMLAAAAIYTAQCTINGFKSWNKCCELHTKYSEEHLMVCSRMMVELHQRAAHGKLTGVHRKYNTSRYSYAAKSEPATFLLDA

SEQ ID NO: 419 - protein, 815 aa, Zea mays
MEVATHMARSSTVYWSLLAVFSWLAAAGAGLGDGGRSPPQVYVVYMGAVPPRTSPSLLLESHLRLVSTVLKRGRRADSLVVHQYKHGFSGFAARLSKDEAAALRRKPGVVSVFADPVYQLHTTRSWDFLQQTTTAVKIDDAAGAGPARRSGNKKGKAAAPANDPSSSSPAADTIIGLLDSGIWPESPSFNDAGFGRPPSRWKGVCMAGDDFNSSNCNNKLIGARYYDLSSVRGPAPSGGGSPRDDVGHGTHTSSTAAGSAVTGASYYGLAPGTAKGGSAASRVAMYRVCSQAGCAGSAILAGFDDAIADGVDVISVSLGASPYFRPDFSADPIAIGSFHAVAKGVTVVCSAGNSGPGAATVVNAAPWILTVAATTIDRDFESDVLLGGNNSAVKGVAINFSNLDRSPKYPLITGAAAKSSSVSDTDSASHCEPGTLDSSKIRGKIVLCHHSQSDTSKLVKADELQSAGAAGCILVMNDNESSVATAYLDFPVTEVTSAAAAAIHKYIAAASEPVATITAAATVTECKPAPVVAYFSSRGPSGQTGNVLKPDIAAPGVNILASWIPASSLPPGQKQPSQFNLVSGTSMACPHVAGAAATVKAWNPTWSPAAVRSAIMTTATTLNNEREPMTTDSGSPATPYDYGAGQVHPAGALDPGLVYDAGEDDYLRFLCNYGYNASTVRLVASTLPSGFSCAANVSKDLISDLNYPSIAVTGLLGNKSAAAGRSRTVTRTVTNVGAQEAASYTVAVSAPPGLDVKVTPSKLEFTRGVKKLAFQVSFSRSGNDDDAAAAKGALSGSITWSDGKHMVRSPFVVTS

SEQ ID NO: 420 - protein, 272 aa, Zea mays
MAAQSMLMSTSVNGGRALPSLQAVRPAPYPRLPLPSSSSSSAGYRHSKSVSVKTLALFGKSKVKTAPAKKAAAPKPKPKVEDGIFGTSGGIGFTKENELFVGRVAMLGFAASLLGEAITGKGILAQLNLETGIPIYEAEPLLLFFILFTLLGAIGALGDRGRFVDEEVTGLDKAVIQPGKGFRGALGLSEGGPLFGFTKSNELFVGRMAQLGVAFSIIGEIITGKGALAQLNIETGVPINEIEPLVIFNVLFFFIAAINPGNGRFIIGEEEE

SEQ ID NO: 421 - protein, 202 aa, Zea mays
MRMRARAASASASAAVVVLLLLLLLVGVCAGAVYKVGDLDAWGVPPPSKPDVYKRWAKSIHFALGDSIWFLYPPSQDSVLQLAPAAFASCDLSRPVARLADGNSLFNLTAPGRAYYASGAPGHCRRGQKLWVDVPLPNGTYLQPSATDLAALAPTPAADPPAGFASAAAAAPQGGNASPAPRAAAAAGSVVALSFALQILLL

SEQ ID NO: 422 - protein, 746 aa, Zea mays
MTRRVRRRTCREREGKVVRGASRVVSAGPEGEEDAAAVEVDWRALPDDTVLQLFARLNYRDRASMASACRAWRALGSSPCLWRTLDLRAHRYDREVASSLASRCGSLRRIRLRGHEAAEAVLGLRARGLREVVADGCRGLTDATLAVLAARHEDLQSLQIGPDPLERISSDALRHVALCCSQLCRLRLSGLREVDAEAVGALARCCPLLEDVAFLDCGTVDEAALAGIHSVRFLSVAGCRNLKWATASTCWTQLPSLIALDVSRTDVPPSAVSRLISHAKTLKLICTLNCISVEEEQLHNPAVFSNSKGKVVLTINSDIFKSFETMFPVVDVKEHEFFNQCNWSHKDKIPGDTMTWLEWILSQSLLRIAESNPQGMDGFWLQKGTTLLLRLLKSLQEDVQERAATSLATFVVMDDESANVDPARSEAVMQNGGIRMLLDLARCSRESAQSEAAKAIANLSVNTKVAKAVADEGGITILINLAKSMNRLVAEEAAGGLWNLSVGEDHKAAIAVSGGIKALVDLIFRWPAGTDGVLERAAGALANLAADDKCSLEVAKAGGVHALVTLARSCKLDGVLEQAARGLANLAAHGDNNDNNAAVGQEAGALEALVQLTSSQNEGVRQEAAGALWNLSFDDRNREAIAAVGGVEALVALVQQCLNASEGLQERAAGALWGLSVSEANSIAIGQGGGVAPLLTLARSEVEDVHETAAGALWNLAFYSEWMKLLWLEHPQIAVPRVLMLRELEE

SEQ ID NO: 423 - protein, 269 aa, Zea mays
MSRYCVNEQSSTRPHPASAGSWHGSTPAGSSPSNLKQATTGKEQLGGGCCSAARLRVRDDDMGRGRSEIKRIENPTQRQSTFYKRRDGLFKKARELAVLCDVDLLLLLFSGSGKLYHYLSPTVPTVKDLVERYEAATHSKVWADVRQERRAELEKAERMCELMEKELRFMTVDDGEQYTVPSLELLEHSLEAAVHRVRSEKDRKIGGEIDCLQNIIRGRHEERYGLCDKNFLQIWPQLAHSQAWNNGGEGGGSTPPSGGGGLELKLGFN

SEQ ID NO: 424 - protein, 364 aa, Zea mays
MDRAALTVGPGMDMPIMHDGDRYELVRDIGSGNFGVARLMRNRADGQLVAVKYIDRGEKIDENVQREIINHRSLRHPNIIRFKEVILTPTHLAIVMEYASGGELFERICNAGRFSEDEARFFFQQLISGVSYCHSMQVCHRDLKLENTLLDGSTAPRVKICDFGYSKSSVLHSQPKSTVGTPAYIAPEVLLKKEYDGKVADVWSCGVTLYVMLVGAYPFEDPDEPKNFRKTIQRILGVQYSVPDYVHISPECQDLISRIFVANPSTRITMPEIRSHPWFLKNLPADLVDDSATTTSKQYEEPEQPMQGMDEIMQILGEATIPAAGSRGLNQFLNDGLDLDDDMEDLDSDADLDLESSGEIVYAM

SEQ ID NO: 425 - protein, 563 aa, Zea mays
MRAMAEVMQEGCVENRQPLAASSSSVSDGSSCGGGERAGTSPPVSSSGNCISVLRRTSGPIRRTKGGWTLKEDETLRKAVEAFKGRNWKKIAEFFQDRTEVQCLHRWQKVLNPELIKGPWTQEEDEKIIDLVRKYGPTKWSIIAKSLPGRIGKQCRERWHNHLNPEIRKDAWTPEEERALIDAHQVFGNKWAEIAKVLPGRTDNSIKNHWNSSLKKKLEAYSNSSVLSVSKLFVHDDFKDKMKPVATDGHLDLNQMPSIGSKDSSGRAYHSIVSPLSQAYNLDSSCLSLSIPTMQPLTSHEMSSLIDGSAVTLVVQCLESDSVRDKDQEIDSVQEKGVEVSSTPDPVGVELESAPAKRGAELSSKNELHSTLGPLCYQILNMEDVIPISTPLCSEHNGAHQTSQQCMSPNGYTSLSPTIGKVSSQLTVDSILRMAADSFPCTPSILRKRKRNKATPGSGNELKTGGVNNDSFYTPNGTNGKDTTPRSFKTAASFSSLGSVDGLLTSVRSFDSSPPYQKRSKRMAIIKSVEKQLDFSADGLDTSGSEIMNSPCHNSQGVDSNRM

SEQ ID NO: 426 - protein, 563 aa, Zea mays; identical to SEQ ID NO: 425

SEQ ID NO: 427 - protein, 563 aa, Zea mays; identical to SEQ ID NO: 425

SEQ ID NO: 428 - protein, 970 aa, Zea mays
MASTKAPGPGEKHHSIDAQLRQLVPGKVSEDDKLIEYDALLVDRFLNILQDLHGPSLREFVQECYEVSADYEGKGDTTKLGELGAKLTGLAPADAILVASSILHMLNLANLAEEVQIAHRRRNSKLKKGGFADEGSATTESDIEETLKRLVSEVGKSPEEVFEALKNQTVDLVFTAHPTQSARRSLLQKNARIRNCLTQLNAKDITDDDKQELDEALQREIQAAFRTDEIRRAQPTPQDEMRYGMSYIHETVWKGVPKFLRRVDTALKNIGINERLPYNVSLIRFSSWMGGDRDGNPRVTPEVTRDVCLLARMMAANLYIDQIEELMFELSMWRCNDELRVRAEELHSSSGSKVTKYYIEFWKQIPPNEPYRVILGHVRDKLYNTRERARHLLASGVSEISAESSFTSIEEFLEPLELCYKSLCDCGDKAIADGSLLDLLRQVFTFGLSLVKLDIRQESERHTDVIDAITTHLGIGSYREWPEDKRQEWLLSELRGKRPLLPPDLPQTDEIADVIGAFHVLAELPPDSFGPYIISMATAPSDVLAVELLQRECGVRQPLPVVPLFERLADLQSAPASVERLFSVDWYMDRIKGKQQVMVGYSDSGKDAGRLSAAWQLYRAQEEMAQVAKRYGVKLTLFHGRGGTVGRGGGPTHLAILSQPPDTINGSIRVTVQGEVIEFCFGEEHLCFQTLQRFTAATLEHGMHPPVSPKPEWRKLMDEMAVVATEEYRSVVVKEARFVEYFRSATPETEYGRMNIGSRPAKRRPGGGITTLRAIPWIFSWTQTRFHLPVWLGVGAAFKFAIDKDVRNFQVLKEMYNEWPFFRVTLDLLEMVFAKGDPGIAGLYDELLVAEELKPFGKQLRDKYVETQQLLLQIAGHKDILEGDPFLKQGLVLRNPYITTLNVFQAYTLKRIRDPNFKVTPQPPLSKEFADENKPAGLVKLNPASEYPPGLEDTLILTMKGIAAGMQNTG

SEQ ID NO: 429 - protein, 322 aa, Zea mays
MEHGAVAGKPKVVFVLGATATGKSKLAIALAERFNGEVINADKIQVHDGVPIITNKVTEEEQGGVPHHLLSVRHPDADFTAEEFRREAASAVARVLSAGRLPVVAGGSNTYIEALVEGDGAAFRAAHDLLFVWVDAEQELLEWYAALRVDEMVARGLVSEARAAFGGAGVDYNHGVRRAIGLPEMHAYLVAEREGVAGEAELAAMLERAVREIKDNTFRLARTQAEKIRRLSTLDGWDVRRIDVTPVFARKADGTECHELTWKKQVWEPCEEMVRAFLEPSLTAVPGVAVTEEGNAGVVATAAPAGDVVVPTGDVVTAVADA

SEQ ID NO: 430 - protein, 326 aa, Zea mays
MADNAKAAAAHARPESSQEEEEDWKEAEGDVAEVDRAATNGAGEGGVPTDRPIRVYADGIYDLFHFGHAKSLEQAKKSFPNTYLLVGCCNDELTHKFKGRTVMTEDERYESLRHCKWVDEVIPDAPWVVTEEFLDKHNIDFVAHDSLPYADASGAGNDVYEHVKKLGKFKETQRTDGISTSDIIMRIVKDYNEYVMRNLARGYTRKDLGVSYVKEKRLRVNMGLKNLRDRVKQHQEKVGEKWSTVAKLQEEWVENADRWVAGFLEKFEEGCHSMGTAIKERIQERLIKAQSSDFGSLLQYDSYDSDEAKENDEDEDEDELFEDVKE

SEQ ID NO: 431 - protein, 118 aa, Zea mays
MEKYNSKTQLAPLRDTPFALRGALGSSSSYLEQARGYTSSPLAALRPKMSSTTGNRLLHSSCPLSSPVANRPLSPHLPLKKPQFSATFSISHRIFGVALGVAIVSVPLATKFSLMFGV

SEQ ID NO: 432 - protein, 528 aa, Zea mays
MARGDGGQLAELSAGVRGAAAVVDHVAPISLGRLILAGMVAGGVQYGWALQLSLLTPYVQTLGLSHALTSFMWLCGPIAGLVVQPLVGLYSDRCTSRWGRRRPFILTGCMLICVAVIVVGFSSDIGAALGDTKEHCSLYHGPRWHAAIVYVLGFWLLDFSNNTVQGPARAMMADLCDHHGPSAANSIFCSWMALGNILGYSSGSTNNWHKWFPFLKTSACCEACANLKGAFLVAVVFLVLCLTVTLIFAKEVPYRANENLPTTKAGGEVETEPTGPLAVLKGFKDLPPGMPSVLLVTAITWVYAIGHTDYLSWFPFILYDTDWMGREIYHGDPKGSNAQISAFNEGVRVGAFGLLLNSVILGFSSFLIEPMCRKVGPRVVWVTSNFMVCVAMAATALISFWSLRDYHGYVQDAITANASIKAVCLVLFAFLGVPLAILYSVPFAVTAQLAATRGGGQGLCTGVLNISIVIPQVIIALGAGPWDALFGKGNIPAFGVASAFALVGGVVGVFLLPKISKRQFRAVSAGGH

SEQ ID NO: 433 - protein, 430 aa, Zea mays
MTGGSGVVVIDNGGGLLKAGFGGDNDPIAVVPNCMAKPPGGNASSKKWLVADQLQAEDVDVTGMTLKRPIDRGYLINTEVQRDVWERVLRNLLQVDPTNSSLLLVEPMFNPPAIQHATDELVFEEFGFNSLYVADGPSLVHLYEASRQPMMFRAQCSLVVDCGFSFTHASPVLQNFTLNYGVRRMDLGGKALTNYLKELVSYRSLNVMDETLLIDDAKEKLCFVSLDVPGDLHLARLSFKDNPFRCSYILPDGITYKKGFVKDMDEALRYRTLPQVSDSKDHGMDTNKSEDRKKAELSQNEFVLTNERFLVPEMLFHPIDLGINQAGLAECIVRAVQACHPYLQPVLFESIILTGGSTLFPRFTERLERELRPLVPDDYKVKITRQENPIFGVWRGGSILASSPDFESMCITKSEYEEMGSARCRRRFFH

SEQ ID NO: 434 - protein, 106 aa, Zea mays
MWGKGKKRFGGGGSGEPAAKRQAARDDGPSESAEDGTVVAEISKNKKVSVRSWKGRVFVDLREFYFKDGKTLPTRKGISLQLDQFFFAVKCQDAHTYAMITISSCY

SEQ ID NO: 435 - protein, 493 aa, Zea mays
MDPYKHRPSSAFNAPYWTTNSGAPVWNNDSSLTVGARGPILLEDYHLVEKLANFDRERIPERVVHARGASAKGFFEVTHDITHLTCADFLRAPGVQTPVIVRFSTVIHERGSPETLRDPRGFAVKFYTREGNWDLVGNNFPVFFIRDGIKFPDMVHALKPNPRTHIQDNWRILDFFSHHPESLHMFSFLFDDVGIPADYRHMDGSGVHTYTLVSRAGTVTYVKFHWRPTCGVRSLMDDEAVAVGGANHSHATKDLTDAIAAGNFPEWTLYIQTMDPEMEDRLDDLDPLDVTKTWPEDAFPLQPVGRLVLNRNIDNFFAENEQLAFCPGLIVPGIYYSDDKLLQTRIFSYSDTQRHRLGPNYLLLPANAPKCAHHNNHYDGSMNFMHRHEEVDYFPSRYDAVRNAPRYPIPTAHIAGRREKTVISKENNFKQPGERYRAMDPARQERFITRWVDALSDPRLTHEIRTIWLSNWSQADRSLGQKLASRLSAKPSM

SEQ ID NO: 436 - protein, 842 aa, Zea mays
MSDWSSPAAPTFFPFGPQAEGWDVTFKVKYGDTLKRFYGCANGSHFDMNLSALRARIDTAFKFGPDVDFVLTYTDEDGDIVMLDDDDDLRDAALRQRLNPLRITVQLKKNQPTEKKDTSAPVKSAAQDPLSQLMSAIEGLKPVQEDSLAHIKSAIGEAIKSIPEPIPDALAKLSHEILDAAPPPLAELMKPFAQLMAPNNNGNGPSDVHAEGSSSSSSAQVPAEAKNEPKVRPSLGLKTVLKEAAGPVPNAGASQVQQPLMYPSVEEMLFPCNSVDKSVCKGKIDAQSKGKSVTSSGIQPAPHSLRTHAPPPPHPCISEWSRAQRSQHRQLKFEDNAKATNDSRWRIPMYKMPYAPPPPAVPPPGYVPSPHFPYPGRLLSSGHPYGDLAGNMENSAPHSLHRWIQCDGCGAQPIVGPRYKSNVKEDYDLCDSCFQRMGNEMEYTKIDKPILPHRFLRDPHVYRKVHHPRVLMKSRREKLESRFILDVTVLDGTLMTPSTPFTKIWRMHNNGSVVWPRGTQLVWVGGDQFALQTSVPLEIPVDGFPVDKEIDVPVDFVAPTRPGRYISYWRLASPSGQKFGQRVWVHIQVEDPSFVNDNNRNAAINLNLPPESYSSNTTNLIDVNIEPADSALSAHAKRTKEFHFCSTDFPEPSKSVPFTLATTSLSAAAPTNQTGDVPMSSTPAAACLPSVNVPMHEVVTTHTPSPITPVLPTTIHFSAPVSAPAIAPELASGAVGVPPPVSAVVPELSELDVHNEEKLLRELEEMGFRQVDLNKEILRQNNYNLEQSVDDLCGVNEWDPLLAELEEMGFDDTEMNKELLAKNEGSIKRAVMELIAREKKDK

SEQ ID NO: 437 - protein, 598 aa, Zea mays
MSEEDEDQPPPKRPCASPPADQVLDNVLETVLQFLDAPRDRSAASLVCRSWHRAESATRDSVAVRNLLAASATRAARRFPNARSLLLKGRPRFADFNLLPHGWDASAFRPWAAAVAAGSFPALTSLYLKRIPVTDADLDLLSRPLPASFRDLTLHLCDGFTSRGLASIASHCRGLRVLDVVECDMAEEQEVVDWVAAFPPEPTNLESLSFECYEPPVAFATLEALVARSPRLSRLGVNLHVSLGQLRRLMAHAPRLSHLGTGSFRPAEGGEGEAEFGEVVSAFVSAGRARTLVSLSGFRDLAQEYLPIIDVVCSHLKSLDLSYAAVTPNQILMFIGQCYNLETLWVLDSVRDEGLDAVGIYCKKLQTLRVLPLDAHEDADELVSEVGLTAIARGCPALRSILYFCQTMTNAAVVDMSRHCPELKVFRLCIMGRHQPDHATEEPMDEGFGAIVKNCRKLTRLSTSGQLTDRAFEYIGRHGKSLRTLSVAFAGNSDVALQYILRGCSKLEKLEIRDCPFGDAGLLSGMHQFYNMRFVWMSGCNLTLRGCKEVARGLPRMVVELINGQPDESERKESVDILYMYRSLDGPREDVPPFVKIL

SEQ ID NO: 438 - protein, 219 aa, Zea mays
MTAEGEAKNPSAGGGGDNPQHQQAAPAPAPAQGEVAQEAAVQGTGQEQERDKADREVQGGAGEKDDGACRDLVLVEDPEVLAVEDPEEAAATAALQEEMKALVASIPDGAGAAFTAMQLQELEQQSRVYQYMAARVPVPTHLVFPVWKSVTGASSEGAQKYPTLMGLATLCLDFGKNPEPEPGRCRRTDGFPGGRRARFCFRVKTRRSWQGYRRCQEGR

SEQ ID NO: 439 - protein, 395 aa, Zea mays
MWLEEVRRRERGELRARRFEAAARACRTASLALSNRKEFVTPHHGAVNSLQVDLTEGRYLLSGASDGSAAVFDVWNATEYETGFIAKHRNILLVDKQHQNGHKFAISAAVWYPVDTGLFVTASFDQFVKVWDTNSTQVVMEFKMPGKVYTAAMSPIATTHVLIATGSADVQWSASSEWILMSGGCDGAIRFWDIRRAGCFRVLDQSRSQLGKRPLVKSALYKDHTDSLGPSPSARRRTGISKKSSSALRKIQNPTHGHMQQRLHPGLSSSQNRATAHYGAVTGLRTTADGMYLLSSGSDSRLRLWDIDSGCNTLVNFEAMRLQTGKPLQLAVTEDPSLVFVPCMASIKAYNLWSGKTFQTFRGHYELVSCCYYSEQDQEDDDKILSAADEDNWSD

SEQ ID NO: 440 - protein, 470 aa, Zea mays
MAHPSAAAAAVSSTAPAANPSSGAREEGGARSPPSPSPSQRGRAKVVIVMGATGAGKSRLAVDLAAHFAGVEVVSADSMQLYRGLDVLTNKAPLHEQNGVPHHLLSVIDPSVEFTCRDFRDRAVPIIQEIVDRGGLPVVVGGTNFYIQALVSPFLLDDMAEEMQGCTLRDHIDDGLTDEDEGNGFERLKEIDPVAAQRIHPNDHRKIKRYLELYATTGALPSDLFQGEAAKKWGRPSNSRLDCCFLWVDADLQVLDSYVNKRVDCMMDGGLLDEVCSIYDADAVYTQGLRQAIGVREFDEFFRAYLPRKESGEGSCASLLGMHDDQLKSLLDEAVSQLKANTRRLVRRQRRRLHRLSKDFGWNLHRVDATEAFFCATDDSWQKKVVKPCVDVVRRFLSDNSTVLPSTSASDPSSRELWTQYVCEACGNRVLRGAHEWEQHRQGRGHRKRVQRLKQKSLRPWPSLLPQDRS

SEQ ID NO: 441 - protein, 470 aa, Zea mays; identical to SEQ ID NO: 440

SEQ ID NO: 442 - protein, 336 aa, Zea mays
MAIAAVPASLPFVLLPPRLFRGRAVRWPRPIRASASTNAGDVAGGERKFGALVSRVGDLRALVASVPPAVASMQKNIGPNFVAGFCVSMAFVAAAARQISLRSREHVSKGSVADLVRRGQLKSGQRGIAKLRTYDDPFNNPLVKIDEGTSTAQMFGKEYRLAPVRLTKEQQEMHQNRRSRAYQWKRPTVFLREGDSLPPDVDPDTVRWIPANHPFSAASSEVDEETAKQNVYQKDGIPSRVKAEHEALQARLEASNDVTRLPSDPRSIQRNERPMRLSGKPSEHLQSSKFENQDRQLATESGKHSSESLMDVYNQTSRKGNKNCVLQLFEDICFVT

SEQ ID NO: 443 - protein, 448 aa, Zea mays
MERARARAPALALAPVEVPKFFVCPISLEVMRDPVTLSSGITYDRDSIERWLFTDGHGDCPVTKLPLGADDLEPTPNHTLRRLIQSWCAAHAVERFPTPRPPVDADRVAAIVGCAKKGGQQEVLAALRELADIIGESDRNRRCVEGVPEAVEFLVSVVKKHAAGTSSSKPLGGCRSQEEPMCGVPDSPKACSPEEAALSILHSLKLSEASLKRALESSDGFVDTLASVLRWPPNYRARTYAMHLLKAALSAMQPSQLSSASTDLVEGVVRVVADRTLSPKAIKVALHVLCRLCPWGRNRVKAVEAGAVAAVVELLLNVGCGCGGSNGKRAVELAVVAIDHLCGCAEGRLELVAHPAGLAVVARAATRLSPTATESAVRALHAVARHSATPAVLQEMLAVGVVARLLYLVQAGASGERPRERAREMLKMHARVWRGSPCLASHMASYPC

SEQ ID NO: 444 - protein, 170 aa, Zea mays
MAPTVMMASSATAVAPFQGLKSTASLPVARRSSRSLGNVSNGGRIRCMQVWPAYGNKKFETLSYLPPLSTDDLLKQVDYLLRNGWIPCLEFSKVGFVYRENSTSPCYYDGRYWTMWKLPMFGCNDATQVYKELQEAIKSYPDAFHRVIGFDNIKQTQCVSFIAYKPPGSD

SEQ ID NO: 445 - protein, 170 aa, Zea mays; identical to SEQ ID NO: 444

SEQ ID NO: 446 - protein, 372 aa, Zea mays
MSARLRVAELRAELQRRGLDVSGTKPALVRRLDAAICEAEKAVVAAAPTSVANGYDVAVDGKRNGGNNKRKRSGDGGEEGNGDTCTDVTKLEGMSYRELQGLAKARGVAANGGKKDVIQRLLSATADPAAVADGGPQGEKEVIKGGDEEVEVKKEKMVTATKKGAAVLDQHIPDHIKVNYHVLQVGDEIYDATLNQTNVGDNNNKFYIIQVLESDAGGSFMVYNRWGRVGVRGQDKLHGPFPTRDQAIYEFEGKFHNKTNNHWSDRKNFKCYAKKYTWLEMDYGETEKEIEKGSITDQIKETKLETRIAQFISLICNISMMKQRMVEIGYNAEKLPLGKLRKATILKGYHVLKRISDVISKADRRHLEQLTG

SEQ ID NO: 447 - protein, 142 aa, Zea mays
MAGIGPIRQDWEPVVVRKKAPTAAAKKDEKAVNAARRSGAEIETMKKFNAGMNKAASSGTSLNTKRLDDDTENLAHERVPSDLKKNLMQARLDKKLTQAQLAQMINEKPQVIQEYESGKAIPNQQIIGKLERALGTKLRGKK

SEQ ID NO: 448 - protein, 237 aa, Zea mays
MAASARPGERATSFAVACSLLSRFVRQNGAAPAQLGLGIKGEVEQQRTPATINLLPGADGEETERRKETMELFPQSAGFGVKDAAAAPREQENKEKPKQLTIFYGGKVLVFDDFPADKAKDLMQLASKGGPVVQNVVLPQPSAPAAAVTDKAVPVPVISLPAAQADAKKPTRTNASDMPIMRKASLHRFLEKRKDRLNANAPYQTSPSDAAPVKKEPESQAWLGLGPNAVKSNLNLS

SEQ ID NO: 449 - protein, 233 aa, Zea mays
MEQYDGLFPPAYVDSSSSLLLVPNANGTAQEERPRARRRRRRAARCGGGGGELDGGGDHKKRRLTDEQVEMLELSFREERKLETGRKVHLGAEIGLDPQQVAVWVPKRRAPPKRKLLEEEVGQYIYNIEHAFRGHMPGWKVTRLKDKLVLAEEELTRFRSAGNDAVSGDGGDVMARAVCSGSPSSSFSTGTCQQPGGGGGGGDHLGDDDLLYVPDYAYADSSVVEWFSLYGLM

SEQ ID NO: 450 - protein, 361 aa, Zea mays
MAASDLESKAKEAFVDDDFELATELYSQAIDAGPATADLYADRAQAHIKLGNYTEAVADANKAIELDPMMHKAYYRKGAACIKLEEYQTAKAALELGSSYASGDSRFARLLKECDERIAEESSQAPVKNVEATVAATIEDKEDFTNMENTPPVIEPPSKPKYRHDYYNSATEVVLTIFAKGVPADSVVIDFGEQMLSVSIEVPGEEPYHFQPRLFSKIIPEKCKYQVLSTKVEIRLAKAEQVTWTTLDYSGRPKTVPQKISTPAETAPRPSYPSSKAKKDWDKLEAEVKKEEKEEKLDGDAALNKFFRDIYKDADEDMRRAMMKSFVESNGTVLSTNWKDVGAKKVEGSPPDGMELKKWEY

SEQ ID NO: 451 - protein, 588 aa, Zea mays
MADVQPESGPDGKALMDAWDYKGRPASRATTGGWACAAMTLGVELFERMTTLGIAVNLVPYMTGTMHLGNAAAANTVTNFIGASFMLCLLGGFVADTYLGRYLTIAIFTAVQATGVVILTISTAAPGLRPPACGAASPNCVRANKTQLGVLYLGLYLTALGTGGLKSSVSGFGSDQFDEAHDVERNKMLRFFNWFYFFVSIGALLAVTVLVYVQDNAGRRWGYGVCAAGILCGLAVFLLGTRKYRFRKLVGSPLTQVAAVTVAAWSKRALPLPSDPDMLYDVDDVAAAGSDAKGKQKLPHSKECRLLDHAAIVGGGESPATASKWALCTRTDVEEVKQVVRMLPIWATTIMFWTIHAQMTTFSVAQAEVMNRAIGGSGYLIPAGSLTVFLIGSILLTVPAYDRLVAPVAHRLTGNPHGLTPLQRVFVGLLLSVAGMAVAALIERHRQTTSELGVTITVFLLMPQFVLVGAGEAFTYMGQLAFFLRECPKGMKTMSTGLFLSTCAFGFFFSTLLVTIVHKVTGHGGRGGWLADNIDDGRLDYFYWLLAVISAINLVLFTFAARGYVYKEKRLADAGIELADEECVAAGH

SEQ ID NO: 452 - protein, 322 aa, Zea mays
MSALEKAESTVFVASGMYAAVAMLSALVPAGGHIVTTTDCYRKTRIYMETELPKRGISMTVIRPADMDALQNALDNNNVSLFFTETPTNPFLRCIDIEHVSNMCHSKGALLCIDSTFASPINQKALTLGADLVIHSATKYIAGHNDVIGGCVSGRDELVSKVRIYHHVVGGVLNPNAAYLILRGMKTLHLRVQCQNNTALRMAQFLEEHLKIARVYYPGLPSHPEHHIAKSQMTGFGGVVSFEVAGDFDATRKFIDSVKIPYHAPSFGGCESIIDQPAIMSYWDSKEQRDIYGIKDNLIRFSIGVEDFEDLKNDLVQALEKI

SEQ ID NO: 453 - protein, 621 aa, Zea mays
MGAALLASWPWDNLGFYKYVLYGPLVGKAVASRAWEAASPDRWILLLLLLFGLRALTYQLWSSFSNMLFATRRRRVVRDGVDFDQIDKEWDWDNFLILHALMAAAALCAFPSLRHLPAWDGRGFAVALVAHAAATEPLSYLAHRALHGSSGRLYARYHSLHHSSRVPQPFTAGLATPLEHVALGALMSLPLAAARAAGCASVALAFAYVLAFDSLRAMGHCNVEVVPASLFRAIPALRYVLYTPTYHAIHHTKKEANFCLFMPLFDLLGGTIDRRSWDMQRKMSAGVDEVPDFVFLAHVVDVMQSLHVPFVMRTFASTPFSVQLFLLPMWPFAFLVMLAMWVWSKTFVISCYNLRGRLHQIWAVPRYGFQYFLPFAKDGINRQIELAILRADKMGVKVLSLAALNKNEALNGGGTLFVNKHPDLRVRVVHGNTLTAAVILNEIPKGTAEVFLTGATSKLGRAIALYLCKKRVRVMMMTLSTERFQKIQKEAPAEFQQYLVQVTKYRSAQHCRTWIVGKWLSPREQRWAPPGTHFHQFVVPPIIGFRRDCTYGKLAAMRLPKDVRGLGACEYSLERGVVHACHAGGVVHFLEGYTHHEVGAIDVDRIDVVWEAALKHGLRPA

SEQ ID NO: 454 - protein, 338 aa, Zea mays
MSMSFLSMVEAELPPGFRFHPRDDELICDYLAPKLGAKPGFSGCRPPMVDVDLNKVEPWDLPVAASVGPREWYFFSLKDRKYATGQRTNRATVSGYWKATGKDRPVVAARRGALVGMRKTLVFYQGRAPKGRKTEWVMHEYRMEPAAPLLDHQPSSSNSKDEDWVLCRVICKKKLAAGGRAGGGSSRSLVASNGGRETAPATPPPPPLPPRMDTDATLAQLQAAMHATAGALEQVPCFSSFNNNTASSRAAAAAAAAQPCYLPSMATGGSHGTTSYYLDHAMLPPELGGCFDPLHGDKKLLKAVLGQLGGDAVAPGLSLQHEMAAGAVVASSAWMNHF

SEQ ID NO: 455 - protein, 442 aa, Zea mays
MEPPASSPAPPNPNPVPDDRPLQQQVEEARAPEPEPERETSPTSLTTSIDPTPSGGEESESDDSSSVSSAPSSASAPAAAAPFPTAKDLLHISFNQDYGCFAAGTKSGFRIYNCDPFREIFRRDLAADGGGAGGGGIGVVEMLFRCNILALVGGGDNPHYPPNKVMIWDDHQSRCIGELSFRSPVRGVRLRRDRIIVVLENKIFVYNFADLKLVHQIETAPNPKGLCAVSQQPGSIVLVCPGAQKGQVRVEHYGARKTKFINAHTSRVSCFALSQDGRLIATASTKGTLVRIYNAAEGNLLQEVRRGADRAEIYSLAFSNNLQYLAVSSDKGTIHVFNLKINVGSTANDKPIPAPDPEVSHISPPLSFIKGVLPKYFHSEWSVAQFRLHEGEQYIVAFGHEKNTVSVVGMDGSFYRCQFDPVNGGEMLQLECYSFLKPSDQP

SEQ ID NO: 456 - protein, 249 aa, Zea mays
MAGAEPPPDLIARAQITTCAARTGSDVTSTSSPSLFQTLQCLDDWVLCRIYNKKGVIERYDTVDDDDGDGAVAEDVKPVPAPAASKNPRASARVGAAAAAPMKVELPEYGGGYYDYDDLETPSAGMLCFDRPSAPAPADRDSNNSVPWTTHHTHTDNSSSGSERVLSPSPDLPDRDHAESQPAAAAAAAGWWPVGGDWGSAAEDGFMVDVDVDDGSSLFGPLSPGLFARVDAAAFGFGDMLASYLHKPF

SEQ ID NO: 457 - protein, 55 aa, Zea mays
MLDKLWDDVVAGPRPETGLEKLRKATTARPLVINKGSTATRPGATTARSGEMDGQ

SEQ ID NO: 458 - protein, 264 aa, Zea mays
MDSSFLPAGADNGSAGGANNGGGAAQQAPPIREQDRLMPIANVIRIMRRVLPAHAKISDDAKETIQECVSEYISFITGEANERCQREQRKTITAEDVLWAMSRLGFDDYVEPLSVYLHRYREFEGEARGVGLAPAPPRGDHHHHHHSVPPSMLNKSRGPGSGAVMLPHHHHHDMHASMYGGAVPPPPHHGFLMPHPQGGHYLPYPYEPTSYGGEHALASGYYGGAAYAPGNNGGSGDGSGGSASHAPPGGSGGGFDHPHTFAYK

SEQ ID NO: 459 - protein, 686 aa, Zea mays
MAAAKARGGEFPVGMKVLVVDDDPTCLVVLKRMLLECRYDVTTCPQATRALTMLRENRRGFDVIISDVHMPDMDGFRLLELVGLEMDLPVIMMSADSRTDIVMNGIKHGACDYLIKPVRMEELKNIWQHVIRKKFNENKDHEHSGSLDDTDRNRPTNNDNEYASSANDGGDGSWKSQRKKREKEDDETDLENGDPSSTSKKPRVVWSVELHQQFVNAVNHLGIDKAVPKKILELMNVPGLTRENVASHLQKFRLYLKRIAQHHAGIPHPFVAPVSSANVAPLGGLEFQALAASGQIPPQALAALQDELLGRPTSSLALPGRDQSSLRVAAIKGNKHHEEREIAFGQPIYKCQNNAYGAFPQNSPAVGGLQPFAAWPNNKVGMTDSTSTLGNVGNSQNSNMLLHELQQQPDTLLLGTLHNIDAKPSGVVMPSQSLNTFPASEGISPNQNPLIIPSQPPSFVSSIPPSMKHESLLGLPSTSTSLLGGLDMVNQASTSQALISSHGTNLPGLMNRSSNAIPSPGISNFQSGNIHYVVNQNAMGVSSKPPGVLKTESTDSLSCSYGYIGGSTSVDSGLFSSQSKNPQYDLLQNQNDVNGSWSPSQDFDSFGNSLGQGHPGTTSSNFQSSALGKLPDQGRGRNHGFVGKGTCIPSRFAVDEVESPTNNLSHSIGNSGDIVNPDIFGFSGHM

SEQ ID NO: 460 - protein, 686 aa, Zea mays; identical to SEQ ID NO: 459

SEQ ID NO: 461 - protein, 475 aa, Zea mays
MPRSGGGGNGGGISSSSRVMPNLPAGFRFHPTDEELMVHYLMRQAASMPCPVPIIAEVNIYQCNPWDLPAKALFGDKEWFFFSPRDRKYPNGARPNRAAGSGYWKATGTDKAILSSSTPTSHGGANIVVGVKKALVFYGGRPPKGTKTDWIMHEYRLSGAADDDCKGSTRRRVSSSSSSSMRLDDWVLCRIHKKSNDFQLSSSSEHEHEQEEPAAGGSATTVEELDALVVVDNSSSSDTTTTTITTNDNNSTETAATHHDPQTMMMLSKSCSLTDLLDSIDYAALSSQMLLLDAPHPHADDPPPHMVYYPPAASATHQQAIIANNTNSNDDYYDDDNLLPTAAATAVDAAAAAVLLSSSPADTNGVNKRKRVTAVDYYGAAEPPTFFHHHLDDGGNSFFSTTKKLKPPPPSDSRHGGHFGTATASSYRDSQQLVDSASSSGVFFHQYGYGYSSSNPFLNLNQQQQLLLNSHIGMQ

SEQ ID NO: 462 - protein, 509 aa, Zea mays
MGAFAKEEHQFLAELGLAQRNPGAFACGAWGGSGPTVTSTSPTNNQVIAEVVEASVHDYEEGMRACFDAAKTWMAIPAPKRGEIVRQIGDALRAKLHHLGRLVSLEMGKILPEGIGEVQEIIDMCDYAVGLSRQLNGSIIPSERPNHMMMEVWNPLGVVGVITAFNFPCAVLGWNACIALVCGNCVVWKGAPTTPLITIAMTKIVASVLEKNNLPGAIFTSFCGGTEIGQAIALDIRIPLVSFTGSTRAGLMVQQQVSARFGKCLLELSGNNAIIVMDDADIQLAVRSVLFAAVGTAGQRCTTCRRLILHENIYQTFLDQLVEVYKQVRIGDPLEKGTLLGPLHTPASKENFLKGIQTIKSQGGKILFGGSAIESEGNFVQPTIVEITPSAPVVKEELFGPVLYVMKFQSLKEAIEINNSVPQGLSSSIFTKRPDIIFKWLGPHGSDCGIVNVNIPTNGAEIGGAFGGEKATGGGREAGSDSWKQYMRRATCTINYGSELPLAQGINFG

SEQ ID NO: 463 - protein, 130 aa, Zea mays
MGEDLSGLNVKELQSLENQLETSLRGVRTKKDHLLIDEIHELNRKASLFHQENTDLYNKINLIHQENAELHKKIYETEGPSGVNREPPTPFNFAVVETRDVPVQLGLSTLPQQNNIEPSTAPKLGLQLSP

SEQ ID NO: 464 - protein, 901 aa, Zea mays
MASSAVAPRWLRGKVKAVTSGDCLVIMGCTKAEIEPEKSITLSYLMAPRLARRGGVDEPFAWESREFLRKLCIGKEVTFKVDYTAPNIGREFGTVFLCDKNVAYSVVSAGWAKVKEQGSKGGEQNPHLGELLRLEEVAKQQGVGRWSKEPGAAEESIRYLPPSAIGEASGFDAKGFAVENKGKSLEAIVEQVRDGSTVRVYLVPSFQFVQIYVAGVQAPSMGRRPSAPTVIAETDDTANDTNGEDSEGTPAQLTTAQRLVASAASAEIPPDRYGREAKHFTEARVLSRDVRIVVEGTDSFSNIIGSVYYPDGETAKDLALELVENGLAKYVEWSANMLDVEVKIKLKNAELQAKKDQLRIWTGFKPPVTNSKPIHDQKFTGKVVEVVSGDCIIVADDSAPYGSPSAERRVNLSSIRAPKLGNARTDVKPDHFAREAKEFLRMRLIGKQVAVEMEYSRRISTVDGQSVAPTANIADTRVLDYGSVFLGSPSQTDGDDISSAPSSASQPGVNVAELLLSRGFAKTSKHRDYEERSHYYDALLAAESRAEKAKKGVHSQKESPVMHITDLTTVSAKKAKDFLPFLQRNRRHSAVVEYVFSGHRFKLTIPKETCSIAFSLSGVRCPGKGEPYSDEAIALMRRRILQRDVEIEVEAVDRTGTFIGSLWESKTNMGSVLLEAGLAKLSSFGLDRMSDAHVLTRAEQFAKQQKIKIWENYVEGENASNGSAPESKQKEILKVVATEVLGGGKFYVQTVGDQRVASIQQQLASLKLKDAPVIGAFNPVKGEIVLSQFSLDNSWNRAMIVNGPRSVESLNDKFEVFYIDYGNQEVVPYSRLRPVDPSVSSSPALAQLCSLAFIKVPSLEDDFGQEAAEYLSECLLSSSKQYRAMIEERDASGGKSKGQGT

SEQ ID NO: 465 - protein, 105 aa, Zea mays
MASRSSAMEGGAAIQRRNAVKRHLQQRQQEADFLDKKVIASTYFSIGAFLVLACLTVSLLILPLVLPPLPPPPSLLLWLPVCLLVLLVVLAFMPTDVRSMASSYL

SEQ ID NO: 466 - protein, 626 aa, Zea mays
MSPFQGYRGDAVLSGVRSRKRVFATAAAEPVTAAPKRQKRGDEMPLDALPDECLFEVLRRVQGTRARCASACVSRRWLALLAGIRASEAVLAPAAPAVPDLNQEYLSEDDEADLMDLDGDARERTLEGMEATDARLTAAAVAGRLAAVSVRGSHPARGVTDAGISALARGCPELRSLTLWDVPQVTDAGLAEVAAECHSLERLDISGCPMITDKGLAAVAQGCPELKSLTIEGCSGVANEGLKAVGRFCAKLQAVSIKNCALVDDQGVSGLVCSATASSLTKVRLQGLNITDASLAVIGYYGKSIKDLTLSRLPAVGERGFWVMANALGLQKLRRMTVVSCPGLTDLALASVAKFSPSLRLVNLKRCSKVSDGCLKEFAESSKVLENLQIEECSRVTLTGILAFLLNCSPKFKSLSLSKCVGIKDICSAPAQLPVCKSLRSLAIKDCPGFTDASLAVVGMICPQLENVNLSGLSAVTDSGFLPLIKSSNSGLVNVDLNGCENLTDAAVSALVKAHGASLAHLSLEGCSKITDASLFAISESCSQLAELDLSNCMVSDYGVAVLAAAKQLRLRVLSLSGCMKVTQKSVPFLGSMSSSLEGLNLQFNFIGNHNIASLEKQLWRCDILA

SEQ ID NO: 467 - protein, 626 aa, Zea mays; identical to SEQ ID NO: 466

SEQ ID NO: 468 - protein, 569 aa, Zea mays
MSERIDLNNTSQTLAPPKRGRGRPRKNPPPPAHPRPPDPDTPMVSGFAPGDMVWGKKLNHAAWPGLIYSAGGNSTGHEAQLLVSYFGDKAFAWCDAAELRPYEPYFPVAELYDDGGEDFDAAVEASLDEFSRRVEAALASAARPFASADFLASLHDLAADRMGFTNRVQAAVAKAHLRAFDAFRALPDPPQYTLELGLLPHVPLPLPDPKADTDAAAAFTTPASSSRRGRKRKEELVKDDDSDEDWDPSKRGATDLDSDVDFDHRRGSRGRGRGRGGSSGGSGRPRGRPRKTDACRDAPQLKDEDGIQEYPSADEMLLQLLSIATDPVNGNYDSAPVIVSFFSKHKDSKAPSVYEDKELLENFGCKKGRKKPVRSLGLAPKPEASDDKDQFMTVDGQRGRRKSAGSLYSARKAEDSYWCDIIISDFDDGDSDYEGCKRKRPSQNTNRSANKKMKQEEPPQGAPSDMENGAPADPSSNEKPADGPAALILHFSSPEAIPSVDDINSIFRIHGPIVERETVITKKSKIAKVVFSKSADAESAYHSSGKHNAFGPSLLTSEIKYLPSEPQAS

SEQ ID NO: 469 - protein, 454 aa, Zea mays
MELVAWLVIVFSVSLAGLLPVVSASTTTPQQQCGGNNVGPAGVRAGYWSPSSNRYSAVGSIDASLYTHLYYSAVTIDETSYAVAPPPPTAEDASLLAAFSGAVKSASPSTRTVLSVGTDEYRVGESNAAFSRMASDAGLRAVFINSSLNLARANGFDGLDLSWIFPATQADMQNLGALLAEWRARITEESVAKSLPPQPQPLLLTATLYFSNHLFGTPDGNLDYPVDAIASSLDWANVLTFGFRGDSGVTAADAPLYDTSSHFSASYGVVSWLDAGLPPCRLVMGIPLFGRSWFLRNKAKNGLGAPAAAAGTKQRRSNQTGIIAYAETEEYLSSQGTVVTYDDQSVAEYFCSGDLWVSFDGAQVVQRKLEFAARSQLLGYFLWTVGFDDSNSTISRKASESWHQYAQGGFGIMHAGGSNQYVAFNSSSVSLGSCYSRSLSCLLSSVLLLVILFR

SEQ ID NO: 470 - protein, 454 aa, Zea mays; identical to SEQ ID NO: 469

SEQ ID NO: 471 - protein, 706 aa, Zea mays
MATVNNWLAFSLSPQELPPSQTTDSTLISAATADHVSGDVCFNIPQDWSMRGSELSALVAEPKLEDFLGGISFSEQHHKSNCNLIPSTSSTVCYASSAASTGYHHQLYQPTSSALHFADSVMVASSAGVHDGGSMLSAAAANGVAGAASANGGGIGLSMIKNWLRSQPAPMQPRAAAAEGAQGLSLSMNMAGTTQGAAGMPLLAGERARAPESVSTSAQGGAVVVTAPKEDSGGSGVAGALVAVSTDTGGSGGASADNTARKTVDTFGQRTSIYRGVTRHRWTGRYEAHLWDNSCRREGQTRKGRQGGYDKEEKAARAYDLAALKYWGATTTTNFPVSNYEKELEDMKHMTRQEFVASLRRKSSGFSRGASIYRGVTRHHQHGRWQARIGRVAGNKDLYLGTFSTQEEAAEAYDIAAIKFRGLNAVTNFDMSRYDVKSILDSSALPIGSAAKRLKEAEAAASAQHHHAGVVSYDVGRIASQLGDGGALAAAYGAHYHGAAWPTIAFQPGAATTGLYHPYAQQPMRGGGWCKQEQDHAVIAAAHSLQDLHHLNLGAAGAHDFFSAGQQAAAAAAMHGLASIDSASLEHSTGSNSVVYNGGVGDSNGASAVGSGGGYMMPMSAAGATTTSAMVSHEQMHARAYDEAKQAAQMGYESYLVNAENNGGGRMSAWGTVVSAAAAAAASSNDNIAADVGHGGAQLFSVWNDT

SEQ ID NO: 472 - protein, 263 aa, Zea mays
MTTSGAPKRPSFKRSSPGKKSRLRTRRVAAGGREGEAEAEAAGTSALARALLPASVGLDAVPPVGRALPRDFFEVDALDLAPRLLGKLLRRDEVVLRITEVEAYRPNDSACHGRFGITARTAPVFGPGGHAYVYLCYGLHMMLNVVADIEGVGAAVLIRSCSPVSGLETIQRRRGQQTEKPILLTGPGKVGQALGLSTDWSNHPLYAPGGLEVLDGPEPESILVGPRVGIEYASPEHVAAPWRFAIAGTPWISAPKNTLRPRY

SEQ ID NO: 473 - protein, 437 aa, Zea mays
MAATMAVTTMVTRSKESWSSLQVPAVAFPWKPRGGKTGGLEFPRRAMFASVGLNVCPGVPAGRDPREPDPKVVRAADNCDIARQLGAAVPGQQAAWEAEEEAAKRRKQKGGGSKKQQQLGDLSLRKVRVKIANPHLRRLVSGAIAGAVSRTFVAPLETIRTHLMVGSIGVDSMAGVFQWIMQNEGWTGLFRGNAVNVLRVAPSKAIEHFTYDTAKKFLTPKGDEPPKIPIPTPLVAGALAGFASTLCTYPMELIKTRVTIEKDVYDNVAHAFVKILRDEGPSELYRGLTPSLIGVVPYAACNFYAYETLKRLYRRATGRRPGADVGPVATLLIGSAAGAIASSATFPLEVARKQMQVGAVGGRQVYQNVLHAIYCILKKEGAGGLYRGLGPSCIKLMPAAGIAFMCYEACKKILVDKEDEEEEDEAGGGEDDKKKVE

SEQ ID NO: 474 - protein, 260 aa, Zea mays
MDSEAVQHGCAHYSRGCSVVAPCCGQAFGCRHCHNDAKNSLEVDPRDRHEIPRHEIKKVICSLCSKEQDVQQNCSSCGACMGKYFCKVCKFFDDDVSKGQYHCDGCGICRTGGVENFFHCDKCGCCYSNVLKDSHHCVERAMHHNCPVCFEYLFDSTKDISVLQCGHTIHLECMNEMRAHHHFSCPVCSRSACDMSATWRKLDEEVAATPMPDIYQKHMVWILCNDCSATSSVRFHVLGHKCPACSSYNTRETRAACPRI

SEQ ID NO: 475 - protein, 287 aa, Zea mays
MLFSRSPAATNQPLVPSRRTLLLSPCPRAGATPAPVADAALLPGGLRAESLPRHVAVVMDGNSRWARARGLPSAAGHEAGRRALEEVVRLSRAWGVRTLTAFAFSHENWSRPKVEVEFLMGQFERAIRESVAEFLREGIRLRVIGDSSRLPVSLQRTAREAEEATRNNSQLDLTLAISYSGRRDIVQACRTLAQKVRDKLLEPEDIDESLFAGELETSHANGNELPYPDLVIRTSGELRLSNFLLWQSAYAELFFTDTLWPDFGEADYLQALVSFQSRDRRFGVRKL

SEQ ID NO: 476 - protein, 251 aa, Zea mays
MGRGPVQLRRIENKINRQVTFSKRRNGLLKKAHEISVLCDAEVALIVFSTKGKLYEYSSHSSMEGILERYQRYSFEERAVLNPSIEDQANWGDEYVRLKSKLDALQKSQRQLLGEQLSSLTIKELQQLEQQLDSSLKHIRSRKNQLMFDSISALQKKEKALTDQNGVLQKFMEAEKEKNKALMNAQLREQQNGASTSSPSLSPPIVPDSMPTLNIGPCQHRGAAESESEPSPAPAQANRGNLPPWMLRTVK

SEQ ID NO: 477 - protein, 560 aa, Zea mays
MGEGAGDRVLSRLHSVRERIGDSLSAHPNELVAVFTRLKNLGKGMLQPHQIIAEYNNAIPEAEREKLKDGAFEDVLRAAQEAIVIPPWVALAIRPRPGVWEYVRVNVSELAVEELRVPEYLQFKEQLVEEGPNNNFVLELDFEPFNASFPRPSLSKSIGNGVQFLNRHLSSKLFHDKESMYPLLNFLRAHNYKGMTMMLNDRIRSLSALQGALRKAEEHLSTLQADTPYSEFHHRFQELGLEKGWGDCAKRAQETIHLLLDLLEAPDPSTLEKFLGTIPMVFNVVILSPHGYFAQANVLGYPDTGGQVVYILDQVRAMENEMLLRIKQCGLDITPKILIVTRLLPDATGTTCGQRLEKVLGTEHCHILRVPFRTENGIVRKWISRFEVWPYLETYTDDVAHEIAGELQANPDLIIGNYSDGNLVACLLAHKMGVTHCTIAHALEKTKYPNSDLYWKKFEDHYHFSCQFTTDLIAMNHADFIITSTFQEIAGNKDTVGQYESHMAFTMPGLYRVVHGIDVFDPKFNIVSPGADLSIYFPYTESHKRLTSLHPEAKKRVCFC

SEQ ID NO: 478 - protein, 257 aa, Zea mays
MDGGAGFPGTQPVSRSPEDVFRDYRARQAGLIRALTTDVEKFYVMCDPEKENLCLYGLPNETWEINLPAEEVPPELPEPALGINFARDGMDEKDWLSLVAVHSDSWLMSVAFYFGARFGFDKESRKRLFTMINNLPSIYEVVTGTAKKEPKEKTPKSNIKTNKSGSKPSRHAEPNSRVPKMPPPKDEESEEEEGEPQEDQESALCGACGLGYDDFWICCDLCETWFHGKCVKITPAKADHIKQYKCPSCTGSKRAKV

SEQ ID NO: 479 - protein, 142 aa, Zea mays
MGKLWTILTHLHSLAGPTVMLLYPLYASVRAMESPSKLDDEQWLAYWILYSFVTLMEMLLESLIYWIPIWYELKLLFIAWLVLPNFRGAAFIYDKFVREQLRKHGLTAAGSVKSSSPSSKDKDKPKNKFLAFVTPKKDHEAY

SEQ ID NO: 480 - protein, 876 aa, Zea mays
MSDLASSCKDKLAYFRIKELKDILNQLGLPKQGKKQDLVDRVLAILSDEQGQHHHGWGRKNALTREAVAKVVDDTYRKMQVCAPDLPSRSHSGSDFSHFRPKEEAPDFYHVDTKVRCLCNSTLLNDNMIKCEDGKCQVWQHITCVLIPDKPTEGAGPDIPPHFYCELCRLKRADPFWVTTGNPLLPVKFMSSGVGNDGASVPQIVEKTFQLSRADRETVQRQEYDLQVWCILINDKVQFRMQWPQYAELQVNGIPVRVMTRPGSQLLGINGRDDGPLVTTCSREGINKISLSRVDARTFCFGVRIVRRRTVPQVLNLIPKEGEGESFEDALARVRRCLGGGGATDNADSDSDLEVVTESVTVNLRCPNSGSRMRIAGRFKPCVHMGCFDLETFVELNQRSRKWQCPICLKNYSLENLMIDPYFNRITSLLHNCSEDVNELDVKPDGSWRVKGDAATRDLSQWHMPDGTLCDSKEDTNPGVVSVNEFKREGTSDGHRTLKLGIKKTPNGLWQVSSKPDDKKPVVRNHIQNNTGYSIPNIVPMISSPTGSCRDGEDVSVNQEGGGIQFDISLNQEFDSFAHNFGQTYNTEDRQQEPQHNAADVIVLSDSDEENDPIVRLPAVYANTPTNGDSFPFVTDAAVSGYPEGYQEDAGVGTSGLGLLSNNTGDFEINNWQMHSYPQPEQGFQFFGTDTDVGNPFVGPHNSFSITPEDYSLDCNVGIEDPSAAHDVSICRNSNDVHGSLVDNPLALAGDDPSLQIFLPSQPSTVPLQEELSERANTPNGVHPDDWRISLTLAAGGGGNEEPTSVDGLKSQPKVPSKEAGVEPLLDAASALPSMNNDRCNGSNLNPRRIENIFSHPRQPRSVRPRLCLSLDSDSE

SEQ ID NO: 481 - protein, 419 aa, Zea mays
MKVEARVGDIYRSLFGAAPNTKSIMLELWRDQHIEYLTPGLRHMGPAFHVLDANRPWLCYWMVHPLALLDEALDDDLENDIIDFLARCQDKDGGYSGGPGQLPHLATTYAAVNTLVTIGSERALSSINRGNLYNFMLQMKDVSGAFRMHDGGEIDVRASYTAISVASLVNILDFKLAKGVGDYIARCQTYEGGIAGEPYAEAHGGYTFCGLAALILLNEAEKVDLPSLIGWVAFRQGVECGFQGRTNKLVDGCYSFWQGAAIAFTQKLITIVDKQLKSSYSCKRPSGEDACSTSSYGCTAKKSSSAVDYAKFGFDFIQQSNQIGPLFHNIALQQYILLCSQVLEGGLRDKPGKNRDHYHSCYCLSGLAVSQYSAMTDTGSCPLPQHVLGPYSNLLEPIHPLYNVVLDKYHTAYEFFSEE

SEQ ID NO: 482 - protein, 419 aa, Zea mays; identical to SEQ ID NO: 481

SEQ ID NO: 483 - protein, 419 aa, Zea mays; identical to SEQ ID NO: 481

SEQ ID NO: 484 - protein, 234 aa, Zea mays
MSEVSVINQAEVEDAGAGQLDLPPGFRFHPTDEEIISHYLAHKALNHRFVSGVIGEVDLNKCEPWDLPGRAKMGEKEWYFFCHKDRKYPTGTRTNRATETGYWKATGKDKEIFRGRGVLVGMKKTLVFYRGRAPRGEKTGWVMHEFRLEGKLPERLPRSAKVRPSPPVLASFNCSFGPGNLFLPPPPPPPPFFVRRWPKSSSFLAAFVCLFVACRTSGPCARCSTRSWRRGPSQ

SEQ ID NO: 485 - protein, 498 aa, Zea mays
MKSCGGGGADGQQCPCDYCGEAAAALHCRADAARLCVACDRHVHAANALSRKHVRAPLCAGCAARPAAARVSLGADPAFLCADCCEGCAAASAARVSVEGFSGCPSAAELAASWGLDLRRAAVAVGDDGDGGDDDDPFLSVLDYSVLGVGVADTDLRDLYVPCDPPRVPVPDAGARPLRGEALCDQLAEMARRDEADTSHAHPHSDLSPRTPRRTSAASSGRLPSGKMAPPAALPVPAHPPPAAPQEVPLPYTSLLMMASANCSDLIGGGDRVGDTDEQLLWDCAAPSVPPTQIWDFNLGRSRHHDEKSALEVGYGSNHGGFMIKSYSDMLKDISSGTTKDLEDIYDSRYCSTAEDIMSSNICQLSSKNVSTGSNKRKVRSCAASTMDGPTTSGNHNHVPASASGPGAALTREISFGDQTVSAPAAETERPAAVRIDSETLAQNRDSAMQRYREKKKNRRYEKHIRYESRKLRADTRKRVKGRFVKSTEALNAARYNG

SEQ ID NO: 486 - protein, 323 aa, Zea mays
MSAAPAAGGQGGGGIDAALLDDIIRRLLEVRTARPGKQVQLSESEIRQLCTVSRAIFLSQPNLLELEAPIKICGDIHGQYSDLLRLFEYGGFPPEANYLFLGDYVDRGKQSLETICLLLAYKIKYPENFFLLRGNHECASINRIYGFYDECKRRFNVRLWKVFTECFNTLPVAALIDDKILCMHGGLSPDLAHLDEIKNLQRPTDVPDQGLLCDLLWSDPGKDVQGWGMNDRGVSYTFGADKVSEFLQRHDLDLICRAHQVVEDGYEFFADRQLVTIFSAPNYCGEFDNAGAMMSVDETLMCSFQILKPAERKQIYGAKQNVR

SEQ ID NO: 487 - protein, 436 aa, Zea mays
MMAPSPVTCSPSAARHRPLQLRSPAPRAAVVAALPLRRREALPHALWIAADPWASARAWTSLGLGTGRRDAARCAAAGQVAGTSSAGVGRSAGMEVVVAAAAVVAMGTGNRVLYKLALVPLRKYPFFLAQFATFGYVVVYFSILYLRYRAGIVTDEMLSLPQKPFLAVGLLEAFGAAAGMAAGAVLSGASIPILSQTYLVWQLLLSAIFLKRRYRINEIAGCFLVAIGVIITVASGSGTSASFKSSGILWPLLMIISFFFQAADTILKEIIFIDASKKLKCGSVDLFVVNSYGSAYQALFMCILLPFLSKLWGVPFHVLPTYIKDGAACFLNMGSISGCEGAPLLPLLFVLVNMGFNISLLNLLKISSAVISSLASTFSVPLSIYAFTLPLPYIGAASSLPPGFVAGAAVLTTGLLLYSLPQAQHYGNSFHNKNDD

SEQ ID NO: 488 - protein, 120 aa, Zea mays
MKSRARSGGGDSRLSVRKTKVEKDPNKPKRPPTAFFVFMEEFRKDYKEKHPNVKQVSVIGKAGGDMWKSLSDAEKAPYVSKAEKLKVEYTKKMDAYNNKQSGGGPTLSGDSDKSKSEGDE

SEQ ID NO: 489 - protein, 598 aa, Zea mays
MAGLPPQPQHVHALPLLLLVVLPCLIPCLRATTEMAPTAATAGASDEGASALLGLLQRVQSEALRTLGPHDFDPKFYVDLPLATDERAAAAALAALPRPSPSRAELDDFLSRYFGDPGSDLVADVPPDFEPEPRGFLPHVHSPEARAWALEVHALWKRLARRVAPDVAARPDRHTLMPLPGRAVVPGSRFREVYYWDSYWVIRGLLVSKMYDTAKTIVLNLVYLLEKYGFVPNGARSYYTNRSQPPLLSSMVLEIYRATGDVEFVRTVFHSLLKEHSFWMSEIHNVAIADNHGRVHNLSRYQARWNKPRPESATIDEELASKLNSMAAKEKLYCEIASTAESGWDFSSRWMRNSTDMTTLATTYIIPVDLNTFLFKMELDIGALAKVVGDNATSEFFLNASKARHIAIDSILWNSEMEQWLDYWLPGDADCQEVHEWKPNSQNRNIFASNFVPLWLNAYHSEFVRFADEAKSNRVMASLKASGLLHAAGIATSLTNTSQQWDFPNGWAPLQHLIAEGLLHSGSEAKKLAEDIATRWVRTNYAAYKATGAMHEKYDVEACGESGGGGEYKPQTGFGWSNGVVLSFLEEFGWPEGKEIAC

SEQ ID NO: 490 - protein, 150 aa, Zea mays
MAASLGLNPEAVFTSYTSSPPFMSDYVAASFLPPAVVDSTDFSAELDDLHHHLDYSSPAPTLAGARSDRSEKQMIRWCEGGGGEKRLGRIGFRTRSEVEILDDGFKWRKYGKKAVKSSPNPRYTHMFTWNIVKINSQNMKATSRKATKKK

SEQ ID NO: 491 - protein, 197 aa, Zea mays
MTMARPGAALPLLLVVVGACCARLAAAVHLSALGRTLIVEASPKAGQVLHAGEDTITVTWHLNASASSVGYKALEVTLCYAPASQEDRGWRKANDDLSKDKACQFRIARHAYAGGQGTLRYRVARDVPTASYHVRAYALDASGAPVGYGQTAPAYYFHVAGVSGVHASLRVAAAVLSAFSIAALAFFVVVEKRRKDE

SEQ ID NO: 492 - protein, 443 aa, Zea mays
MMAASSSSSFNLSDHLVQDDLPWPASSSSSSQLPFAPSHPPHGAIIGGSQQWWQQPQMLNCADRHPSDELEVLLSAQGSHHHHHHPSSSVIHPQLSSLLMMQDLGFQWSSCGSFVDTSSSSPMPPPLVNGQQHDGHNKIKEWDRPLTANNSSRSSCASTAMACRDVVLDGGGGGGLPAMAAVAADLDDGTVLPASVNVPRTTTTRQRPFPAAPPPLPGDAFEILASSRLCKTLLLSQASSSVLLHNGTTMPLLRSEHVPYGPPAPAHPQGPSIGNYKQCMQMGASCGGRAQHEAACQSMAAAAARPALPVVPSSKKPRVEQRSSTIVPSFKVRKEKLGDRIAALQQLVSPFGKTDTASVLMEAIGYIKFLQDQVETLSRPYLKSSRSKKPRPTPRGSSNASAGELEETRPDLRSRGLCLVPLSCTSYVTNENGVWVPPNFRAN

SEQ ID NO: 493 - protein, 282 aa, Zea mays
MSSSISMMEARMPPGFRFHPRDDELVMDYLLQKLSGHGHHAGAAIVVDVDLNKCEPWDLPDSACVGGKEWYFFSLRDRKYATGQRTNRATHSGYWKATGKDRAVVAGGEVAVGMRKTLVFYRGRAPRGKKTEWVMHEFRLHPHAAPCLLAAAAPNKEDWVLCRVFYKSRTTSPRPESEDARDGTPSAEPQLPAALPLAPLADTYAAPTVAEQVYCFSGLPALPFRRPVSLGDLLEFDASEKESVTTAMTSVSNNTSSVLELAPNCNWNQENGMSRMWSPLGI

SEQ ID NO: 494 - protein, 296 aa, Zea mays
MMMMGEGVSVPPWSHHVPVSGVDAGVGGDEMTPYLLAALRQYLPCNDAGAAEADDEEAAAMAAGVDGYGCDEFRMYEFKVRRCARARSHDWTECPFAHPGEKARRRDPRRYHYSGAACPDFRKGGCRRGDACDFAHGVFECWLHPARYRTQPCKDGTACRRRVCFFAHTPDQLRVLPPTPQQSSASPRGAGALPESYDGSPGYPASAAAYGSPTAGGLYSLPSTPTALATASGYMPNLEPLDVSFGGDEEPVERVESGRALRAKVFERLSREGAVSCYPAAGTGGPDVGWVSDLIN

SEQ ID NO: 495 - protein, 461 aa, Zea mays
MGSKDQDGGAASSGGGFFSSFAAGMRSWGTAVHKSVNGLLGYEGLEVINPDGGTDDAEEEALKGRWKQEDRDSYWKMMHKYIGSDVTSLVTLPVIIFEPMTMLQKMAELMEYCELLDKADECEDPYMCMVYASTWAVSVYFAYQRTWKPFNPILGETYEMVNHQGITFLAEQVSHHPPMGVAHCENEHFTYDITSKLKTKFLGNSVEIYPVGRTRVTLKKSGVVLDLVPPLTKVNNLIFGRTWVDSPGEMVMTNLTTGDKVVLYFQPCGWFGAGRYEVDGYVYSAAEEPKIMITGKWNKSLSCQPCDQEGDPLPGTELKEIWRVAPAPQGDKYQYTHFAHKINSFDTAPKKLLASDSRLRPDRYALEKGDMSKSGAEKSRLEEQQRAEKRTREAKGEQFTPRWFNLTDVVSPTPWGDLEIYEYNGKYTEHRAAIDRSDVTDETDVTSVKFSPWQYGSSSSQ

SEQ ID NO: 496 - protein, 119 aa, Zea mays
MHLLDDLRQDRGGAAAHTGSRSRKPPPPLAAAAAAAAGVPAGSSTAATATHLGPEAAALLACVTATLLLLPLVLPPLPPPPPLLLLVPVAIFAVLLLLVLLPSDARAAVATPTSSASYL

SEQ ID NO: 497 - protein, 385 aa, Zea mays
MERQGMEGNNLLHFLDTPSAHYRRTCDGFEAQHGGDEHSETSDTDPANAREMLEYLLNQPANKICADCGSPDPKWVALPFGTFICIKCSGTHRSLGVHISKVISVNLDEWTDDEVNCLAESGGNSVVNSRYEAFLPENKKLKQDCSTEERNDFIRKKYQFQQFVCDPQFSCPLPLNRKHAPPDKNHQQHNSSKYGFGHTFRNSWRKKDSDSKSLKKMSDVGMIEFVGLVKVNIVKGTDLAVRDVMSSDPYVLIHLGHQSMKTKVIKNTLNPIWNERLMLSIPDPIPPLKLQVFDKDTFSSDDRMGEAEVDIRPLIAATKEHENSTITESTELYRWSASEDSNGVLAKDSVISVASGKVKQEITLRLQNVERGEVEIEIECVPLSQ

SEQ ID NO: 498 - protein, 105 aa, Zea mays
MGSPLGGWPSYNPHNFSQLVPADPSAQPSNVTPATYVATHRTDPPPNQVITTEARNILLRHLYQKSEEKLRPKRAAADNLAPENNNKKQPRGPVGDVGGQSSARS

SEQ ID NO: 499 - protein, 565 aa, Zea mays
MGRSRGVQNSGDDDTVHRSKRRRVASGGDATDSVSAGIGGAGEGGGKKALYHCNYCNKDISGKIRIKCSKCPDFDLCVECFSVGAEVTPHRSNHPYKVMDNLSFPLICPDWNADEEILLLEGIEMYGLGNWLEVAEHVGTKSKLQCIDHYTTAYMNSPCYPLPDMSHVNGKNRKELLAMAKVQGESKKGTSLLPGELTPKAESPFSPSRVKVEDALGEGLAGRSPSHIAVGANKKASNVGHIKDGSNVSKVEDGHVDRSVGVKKPRYSADEGPSLTELSGYNAKRHEFDPEYDNDAEQALAEMEFKETDSETDRELKLRVLRIYLSRLDERKRRKEFILERNLLFPNPLEKDLTNEDREVYHRYKVFMRFLSKEEHEALVRSVIEERKIRRRIQELQECRSAGCRTLAEAKIHIEQKRKKEYELNAQKAKESNHLIANTKLVQKMNRPMKIESDGNLDPKKGGVGLDSPKTTGLTSVKQWDDWDIVGLPGAELLSASEKLLCCQNRLLPSHYLRMQEVLMQEIFKGSVLKKEDAHVLFKVDPTKVDSVYDMVTKKLGNHVELPTV

SEQ ID NO: 500 - protein, 565 aa, Zea mays; identical to SEQ ID NO: 499

SEQ ID NO: 501 - protein, 316 aa, Zea mays
MERWGDKDRGAAVPAPGRLRRYADQPSFSSSLLDAIYKSMDEPGDGATSAAAAGATKMQSHQDLHYSYYYKTSLAGSYRGSRAAAAAHAATTTSSSSECSSYGGFSSSEAESSQHRRLRPIRTSVGAAASPAPAPEKKKKAGANIRAKLRDLRKPASPGARLAGFLNTIFSGRRAPATPPSRGAESSACSTASSYSRSCLSKTPSTRGQPKRTVRFLDSDDGEAAAAAPGGERRRVQVGVAELERMLLHRMEMDSDEDDEDEEGSDASSDLFDLENFAAGAPDAAAAYRDELPVYETTRVVLGHRAIGHGRSARVV

SEQ ID NO: 502 - protein, 470 aa, Zea mays
MGAFLLFVCLLAPVVVLACAVRGRKRRASSAAAGGKALPLPPGSMGWPYVGETFQLYSSKNPNVFFARKQNRYGPIFKTHILGCPCVMVSSPEAARFVLVTQAHLFKPTFPASKERMLGPQAIFFQQGDYHAHLRRLVSRAFSPEAIRGSVPAIEAIALRSLESWDGRLVNTFQEMKLYALNVALLSIFGEEEMRYIEELKQCYLTLEKGYNSMPVNLPGTLFHKAMKARKRLGAVVAHIIEARREGERQRGSDLLASFLDDREALTDAQIADNVIGVIFAARDTTASVLTWMVKFLGDHPAVLKAVIEEQQEIARSKGSSGEPLTWADTRRMRTTSRVIQETMRVASILSFTFREAVEDVEYQGYLIPKGWKVMPLFRNIHHSPDHFPCPEKFDPSRFEVAPKPNTFLPFGNGTHSCPGNELAKLEMLVLFHHLATKYRWSTSKSESGVQFGPFALPLNGLPMTFVRKD

SEQ ID NO: 503 - protein, 358 aa, Zea mays
MSMAQVCCDSAVAATAAPVVGAEAEARARARAERRSRAGESGAWKHAVAAGTADATRKRSLGAGELLVARKHGAASVAGRRREMEDAVSVRDAFCAEGTADGGRRDFYGVFDGHGCSHVAEACRDRMHELVAEELAATAADSSVSAAAAWTVAMERSFARMDAEVTSAGGRAAAARSSTCRCDAHRCDHVGSTAVVAVVEEHSVIVANCGDSRAVLCRGDGAPPLPLSSDHKPDRPDELERIESAGGRVIFWEGARVLGVLAMSRAVGDGYLKPYVSSVPEVTVTDRSDGDECLILGSDGLWDVVSNEAACEVARACLRRGRAKWCAEAAALLTKLALARRSSDNVSVVVIDLRRRNH

SEQ ID NO: 504 - protein, 511 aa, Zea mays
METQVAAPPHQQQQQQQKAANLARTFTKLLRRKRAEAAAQGGAPEAPASVAPGDALEEERTEPPPAIPSLSKLKLSGNLAAAYSFDAFFRNAAEKKAAAAGGGAVRQPAGAGEVTLEAAADALLANLFAGVSAVKAAYAQLQLAQFPYDAEAIQSADAAVVAELTRLSDTKRRYLRDPAAAARGAAAAGHTALAAHAEEQRHLLKTYQITARKLESDLRARDAEAERARSSLTGELRAERALEARLHPGRTLASLDELHLSGLNPTHFLTALRHTVKSIRSFSRSMLSSMQSAGWDLGAAAAAVHPGVPLRRAGDAKFVFESYVAMKMFANFHRRDFNFSFLGEREFYERRRFFEEFTELKAEPASAFLDARSPRWGGLGKFLRAKYLSLVHARMETAFFGRLEQRGIVSAGPGFPESSWFADFAEMARRVWLLHCLFFAFDGGAEEDGASIFQVRTGARFSEVYMESASDGSAGDDAEDRVVGFTVLPGFRVGRTLIQCRVYLSKPGRRP

SEQ ID NO: 505 - protein, 642 aa, Zea mays
MMGGGLLVDQSVVFPGVHNFVDLLQQNGDKNLGFGSLMPQTSSGDQCVMGEGDLVDPPPDSFPDAGEDDSDDDVEDIEELERRMWRDRMKLKRLRELQQTRGKDSLASGAGLADGSSKPRQSQEQARRKKMSRAQDGILKYMLKMMEVCRAQGFVYGIIPEKGKPVSGASDNLRAWWKEKVRFDRNGPAAIAKYQADNAVPGAENELASGAASPHSLQELQDTTLGSLLSALMQHCEPPQRRYPLEKGVPPPWWPTGDEEWWPELGIPKDQGPPPYKKPHDLKKAWKVSVLTAVIKHMSPDIEKIRRLVRQSKCLQDKMTAKEISTWLAVVKQEEELYQKLNPGARPPASTGGIASAISFNTSSSEYDVDIIDECKGDEAGNQRTAVTDPTAFNLGAAILSDKFLVPTPMKEETADVEFIQKRNAPAAAEPELMLNNRLYTCNNVQCPRSDYSYGFLDRNARNSHQYTCKHKDPTPQSTENKPPSAPPQPQAFQPAFSQPNQALNSLDFSLPMDGQRSIAELMNMYDNNFVPNKNPSSDSVAVMERPNAMPQQRIQMDEGFFVQGNGAFDDVNNSMMQQQQQQAPVQQQQQFFIRDDTPFVSQMGDIAASAPEFRFGPGFNMSSGVDYPGAAQRNDGTNWFY

SEQ ID NO: 506 - protein, 118 aa, Zea mays
MMLHCTFAISEAPARALALGQVSVMRAMPQEEEAAVATTTMAGGKVAALLATAAALLLLLPLALPPLPPPPTQLLFVPVVLLLLVASLAFCPAATSSPSPMHAADHGSFGTTGSPHLC

SEQ ID NO: 507 - protein, 618 aa, Zea mays
MASSPPRAPQLFPFDLNVAQEEVDEEPIEVLEEDVDEEGAPLAQPQEVVVEEVVEKLVEHAVPITEDEPAEDVIMEEPSEEVIMEDEEPTPSPAEEVVGEGKRRKKRVDYEVFVSGLPQDAAEEDVAQALADAGDIEEVRLVRDPADQRLNKGFAFVRFAAAWQARWAANDLREATIKGKACGICKNSETETLHLRNICFDWSKDDLAEKLKPFKLENLDRINLIEHPDRKGKNRGYAFLDFRTHVDAVEAFVKLQKIDLYLGTDSRANISFSNTLSQDDEIMEKVKSVFLDGVPPHWDEDKVREIFGKFGEIDSIQLARNMFTAARKDFGFIGFTARQSALDCIKMVNKDGVGEGSGKVPIKASLQRPRHAFKKYSRQGSSSLLGVRRGFVDKSSSGRGHHSDRYRHFSPVRRSYSDNHSRRHSIDVEERHTSVRGYRAYYRRDSPVHAPSYKYGRTHLETRISEEYTEGRYTSKYPKHRHTMHGTMERDANRRIKYGHSYQERAHRTCPGCKLCGQNYNYPNGEEFSAISGCQEAYYQTDHDLIPSTSQVASHCEGSCCKGQQLKPKSYSVMRDYDYINQESTPSSSDHARTRSNLPAPPHHWHVKHSNEHRRYVS

SEQ ID NO: 508 - protein, 327 aa, Zea mays
MLSSHRESLLPYAPGRRAAVLLDHRRYRPNVEVAPSCPRCDSPNTKFCYYNNYSLSQPRYFCKGCRRYWTKGGSLRNVPVGGGCRKNRSRGKPVRAVAVDSVAPSSGGAAAFTHRASASSSSASPATLRPDMLLEGMLGSPSELCQLTVTDDDAAENPAVAPDGPRIDLALLYAKFLNQQPPAPERRAVLPESLVVDTLSGSSSSDVGPVVPSRDHQPFTTQDDGLGELSAAASAEPSAPPPQSSSCAEALIGAFGMDQRCYDSLGLPPDGGDLVLPSTWPLLGAKYELFDPLPEDAVSLQDGFAGDEDVWSGALACQGLEAALCRP

SEQ ID NO: 509 - protein, 232 aa, Zea mays
MEYAAVGYGYGYGYDERQEPAESADGGGGGDDEYATVLSAPPKRPAGRTKFRETRHPVYRGVRRRGPAGRWVCEVREPNKKSRIWLGTFATPEAAARAHDVAALALRGRAACLNFADSARLLQVDPATLATPDDIRRAAIQLADAASQQDETAAVAADVVAPSQADDVAAAAAAAAAMYGGGMEFDHSYCYDDGMVSGSSDCWQSGAGAGGWHSIVDGDDDDGASDMTLWSY

SEQ ID NO: 510 - protein, 159 aa, Zea mays
MAAAATATPSVAPEAGDRKAVAPPVDAVDLDLELELEEKHVLAVDDSSVDRAVIAKILRSSKYRVTTVDSATRALELLALGLVPDVNMIITDYWMPGMTGYELLKHVKESSALRAIPVVIMSSENVPTRISRCLEEGAEDFLLKPVRPADVSRLCSRIR

SEQ ID NO: 511 - protein, 162 aa, Zea mays
MGISSMPEPRDSLLGYLVYNAVVSIAALAGLVRAALVFLDLQAAQLPGGAGAGADDDRLAASGPGLGLAERFLRAFRPALYGVLVSTACGAAEAAAGDDDCSVCLAGFEAEAVVNRLPCGHLFHRACLETWLRYERATCPLCRAHVPLPADETPVLRYPELE

SEQ ID NO: 512 - protein, 187 aa, Zea mays
MANDSLTRGHIIGDVLDPFTSSVSLSVLYDGRPVFDGMEFRASAVSVKPRVEIGGDDFRVAYTLVMVDPDAPNPSNPSLREYLHWMVTDIPASTDDSFGRELIPYESPSPTMGIHRLVLVLYQQLGRGTVFAPQVRQNFNLRNFARRFNLGKPVAATYFNCQRQTGTGGRRFTCVFDHVVQGEGRQA

SEQ ID NO: 513 - protein, 307 aa, Zea mays
MRPPGRRRVLAAGACALLLAATFLAAGLLTTSSLAPYLLPPLALSLPCLPAVTAPAGSGYGAAPGVAALAEAAVAYATSETVPQQSVDEISLSLAVLRRRAPLRLLVFGLGHDSRLWHALNPGGATVFLEEDPAWYRVVRAQSPFLRAHLVAYRTRLDQADRLLATYRRHPACLPGGGGGNDTLQLPRVRGNWACPLALYNLPPEVYETEWDMVMIDAPKGYFAAAPGRMAAIWTAAAMARARQGEGDTDVFLHDVDRRVEKAFAEEFLCERFRVGGTGRLWHFRIPPVSRRGEDGTATAGDRNPFC

SEQ ID NO: 514 - protein, 668 aa, Zea mays
MAALLQSSFLFPHATFPNPKPHHLAAAAATRPESPNVAPNPASARLRRLIAREDLAGAARLVELSASRDGEAPDVYLCTKLIRNLCRRGRTSDAARVLRAAEGSGSPVDVFAYNTLVAGYCRYGHLDAARRLIGSMPVAPDAYTYTPLIRVLCDRGRVADALSLLDDMLRRGCQPNVVTYTVLLEAMCKNSGFEQAMAVLDEMRAKGCTPNIVTYNVIINGMCREGRVDDARDLLNRLFSYGCQPDTVSYTTLLKGLCASKRWDDVEELFAEMMEKNCMPNEVTFDMLIRFFCRGGMVERAIQVLQQMTEHECATNTTLCNIVINSICKQGRVDDAFKFLNNMGSYGCNPDTISYTTVLKGLCRAERWNDAKELLKEMVRNNCPPNEVTFNTFICILCQKGLIEQAIMLIEQMQEHGCTVGVVTYNALVNGFCVQGHIDSALELFRSMPCKPNTITYTTLLTGLCNAERLDAAAELVAEMLHRDCPPNVVTFNVLVNFFCQKGFLDEAIELVEQMMEHGCTPNLITYNTLFDGITKDCSSEDALELLHGLVSKGVSPDVITFSSIIGILSKEDRVEEAIQMFHLAQDIGMRPKALVYNKILLGLCKRHEIDNAIDFLAYMVSNGCMPNESTYIILIEGLAREGLLKEAQDLLSMLCSRGVVSKNLIEE

SEQ ID NO: 515 - protein, 466 aa, Zea mays
MASLTSASTSLLFPQASSSRSRIRLSTPLGFSAQPARLRSQGAAVGARRRGRLLVVRAARGKFERTKPHVNIGTIGHVDHGKTTLTAALTMVLASVGGSAPKKYDEIDAAPEERARGITINTATVEYETETRHYAHVDCPGHADYVKNMITGAAQMDGAILVVSGADGPMPQTKEHILLAKQVGVPKIVVFLNKKDMVDDEELLELVELEVRELLSNYEYDGDDVPIVAGSALKALEALMVNPALKRGDDEWVDYIFSLVDKVDSYIPVPQRQTDLPFLLAVEDVFSITGRGTVATGRIERGTVKIGDTVDIVGIRDTRNCTVTGVEMFQKTMDDAMAGDNVGLLLRGMQKDDIERGMVLAKPGSITPHTKFEAVVYVLKKEEGGRHSPFFPGYRPQFYMRTTDVTGSVTTIMNDKDEEAKMCMPGDRIKMIVQLIQPVACEQGMRFAIREGGKTVGAGVINKIIE

SEQ ID NO: 516 - protein, 663 aa, Agrobacterium tumefaciens
MDRVRGSAFLLGVLLAGSLFAFSVAKEETKKLGTVIGIDLGTTYSCVGVYKNGHVEIIANDQGNRITPSWVAFTDSERLIGEAAKNQAAVNPERTIFDVKRLIGRKFQDKEVQRDMKLVPYKIINKDGKPYIQVKIKDGENKVFSPEEISAMILGKMKDTAEAYLGKKINDAVVTVPAYFNDAQRQATKDAGVIAGLNVARIINEPTAAAIAYGLDKKGGEKNILVFDLGGGTFDVSILTIDNGVFEVLATNGDTHLGGEDFDQRIMEYFIKLIKKKYSKDIGKDNRALGKLRREAERAKRALSNQHQVRVEIESLFDGTDFSEPLTRARFEELNNDLFRKTMGPVKKAMEDAGLEKSQIHEIVLVGGSTRIPKVQQLLKDYFNGKEPNKGVNPDEAVAFGAAVQGSILSGEGGDETKDILLLDVAPLTLGIETVGGVMTKLIPRNTVIPTKKSQVFTTYQDQQTTVSIQVFEGERSMTKDCRLLGKFDLNGIPSAPRGTPQIEVTFEVDANGILNVKAEDKGTGKSEKITITNEKGRLSQEEIDRMVREAEEFAEEDKKVKERIDARNQLETYVYNMKNTVGDKDKLADKLEAEEKEKVEEALKEALEWLDDNQSAEKEDYEEKLKEVEAVCNPIVSAVYQRSGGAPGGDADGGVDDDHDEL

SEQ ID NO: 517 - protein, 313 aa, Zea mays
MEPMNVDNGGSGGLDAQIEQLMQCRPLAEQEVKALCEKAKEILMEESNVQPVKSPVTICGDIHGQFHDLVELFRIGGKCPDTNYLFMGDYVDRGYYSVETVTMLVALKVRYPHRITILRGNHESRQITQVYGFYDECLRKYGNANVWKTFTDLFDYFPLTALVESEIFCLHGGLSPSIENLDSVRSLDRVQEVPHEGPMCDLLWSDPDDRCGWGISPRGAGYTFGQDISEQFNHTNNLKLVARAHQLVMEGYNWAHEQKVVTIFSAPNYCYRCGNMASILEVDDCNSHTFIQFEPAPRRGEPDVTRRTPDYFL

SEQ ID NO: 518 - protein, 283 aa, Zea mays
MAYYCNACCAGKSCRLRWFNQLDPRISKRPFSDEEEERLMAAHRFYGNKWAMIARLFPGRTDNAVKNHWHVIMARKYREQSTAYRRRKLNQAVQRKLEAASAAVAMPPGAGAGDVAVGQHHHLLAAAAAAHAHDAAYSFAADPYGFGIRHQYCTFPFPPGAASAEDPPPPTQIHPFCLFPGPSSAAAHADSRRLPWPPSSDAPGVARYGEPHQLLQLPVQSGWIDGVGVAAAGHHEPPFVLGNNGGAAAFEGTTRQQGSGAHFEAAAAPPPPAFIDFLGVGAT

SEQ ID NO: 519 - protein, 133 aa, Zea mays
MGRHAGGVLLALTVVLLLAAASGGVRPADPAAGANNNGLAHGSTAAAEMVVAAPSAAQQLQGRRSKDDDGVLLREEVVRATGSSLPDCSHACGACSPCSRVMVSFKCSAAEPLPCPMVYRCMCRGKCYPVPSS

SEQ ID NO: 520 - protein, 146 aa, Zea mays
MSTTRPEDTQQLINSAAASPNRSAPSAAPSDMERGSGTAASSSRASTTSHSHQRATHRVVEEEEEEEPSSSRGGGSLCSGYLSLPALLLVGVTASLVILPLVLPPLPPPPSMLMLVPVAMLLLLLVLAFMPTSSTGGRGGTGPTYM

SEQ ID NO: 521 - protein, 146 aa, Zea mays; identical to SEQ ID NO: 520

SEQ ID NO: 522 - protein, 146 aa, Zea mays; identical to SEQ ID NO: 520

SEQ ID NO: 523 - protein, 262 aa, Zea mays
MPDQTSAAAAGGAAFDRCLLALYLISPLTVLALRFISAPYGKLSRPGWGPVLPAPLAWFLMESPTLWLPPLVLLRWPPPPLSGPLAALPAALYAFHYVHRTLVHPLRLARLRRAPAPVPLLIAACALGFNILNAYLQARSFALHAGRQASPFRCLAGLALFAWGMRTNIAADKELLRLKEAGGGYKIPRGGWFDLVTSPNYFGETVEWLGFAVVAWTPAAWAFFLYTCANLGPRARDHRRWYVQKFRGEYPASRKAFIPYIY

SEQ ID NO: 524 - protein, 1065 aa, Zea mays
MAAGEHALVEESTVPVVSDVADAAAKPYVRPALFLRPRAGDGAPAPAPPGDPGPVLPRGIEAEFMGWAGVPRLWPEWVAKLRRRHEPLWREVGILGGILASTCRVRHHHHERVLLQLAAFWYGATSTFVFPWGEVTLTLEDVATLAGLPLLGDPVRAPVSDSLEKDVAAIEAVRAVMNRSKKKKSSYGAWVKRFVERTPEEEMPPPATGDGGRDGEAHQLVEHGAFLSMWLSLFVLPGPPFDVVRREIIPLAARLARGESVALAPAALATIYHDLSALKRHITSGDKNGPFVISAPIHILQLWVWEHFTQLRPETVGSSTPDDHDMPRAARWREAGKRLSSKDLHAVLMSPKGFEWRPYKNSRFFGLHPGTGGSWVRGQDIATSEALLSFARCLHPCELVGMNCIEQYNPHRVARQLGFDQDIPGTVPRASSGWEKAWETYNIEAKSSAFIFPNHKPGVTVQYAKWWKPYSSACGSAVANAAKIKEGHDLVSPVKRKMEGVLAGNSGKKVRLRVATATLGCPPNIPAGINVYPSQSSGSHAATRRAAAAPGLVLRACPPHLRFKAVSPTGMPQPLRDAAYDPLDHVSLSERLDGITKMPKQHNTECLVKDSEQERIVKRVKIVTPKPPSAGPEKAVLHKVVEQALPDAVASSAIIHDSSSVFGTERPHARCLQQSKDEDLNSANGENISRRTEHCDVVLLNVVQGAVSTVKSEAIGAGTEVDMLPTHEDLLVVSDGDRCDKSSSMGHEVHLESHMSGAKMSFIRERNEGTELVDARNDEEDSQVLKEATKQGNFGDTVKFNDDELDKLTRKEARVFVEAMSNKDAPSAMHLKCPEMEPTRTILQECNEEKQMVRETNDEHDNPVMKEGTVQNSYDRQLASVLDGTTPRQQPDVLTHAATVQTYDGLLKEPAKEMDTCIVTGDIDNTDKVLNEKFGSLNFSEKGNEDTFVSNQGLEYPMEHSAGASRKKSGNSERFSSSLLDGNTKLVSHEVCTKTLYYLSRFDRMKDAWDKDANSLPRRAVGTMEMIGKASAIRHAEIAELDKKINTLKEEILALEAAEKGKSPE

SEQ ID NO: 525 - protein, 504 aa, Zea mays
MARLVSTATKAMAVVVLAAASAALAAHDYGDALHKSILFFEGQRSGRLPPNQRLRWRQDSAIHDGAEAGVRTGVDLTGGYYDAGDNVKFGFPMAFTATLMSWGLIDFGRSFGAHEAEARDAVRWATDYLMKATATPGVVYVQVGDASRDHACWERPEDMDTPRTVYRVDAAHPGSDVAAETAAALAAGSIVFRDADPGYSRRLLGRAAEVFEFADRHRGAYSGSLRAAVCPCYCDYDGYQDELLWGAAWLHRASRRREYRDYIKRNEVALGASDAINEFGWDNKHAGINVLISKEVLMGKDEFFRSFRENADNFICSLLPGISGHPQIQYSPGGLLFKVGNSNMQHVTSLSFLLLVYSNYLSHADARVPCSSSSSAAAASPVQLRRVAKRQVDYILGDNPLRMSYMVGYGPRYPLRIHHRASSLPSVSAHPARIGCKAGAAYYASPAPNPNLLVGAVVGGPSNSTDAFPDARAVFQQSEPTTYINAPLLGLLAYFSQHPDPAQH

SEQ ID NO: 526 - protein, 732 aa, Zea mays
MGRVGLGVAAGCAAATCAIAAALVARRASARARWRRAVALLREFEDGCATPPPRLRQVVDAMVVEMHAGLASDGGSKLKMLLTFVDALPAGGGAVGRTLPTFLAPIAARIERRTSRVDDAKLRILARSSNCSSRAALRLRNAPGCIPQWRCGLGPSLSDGNHCSGRHHLLMRIAKLVGIEKRNEEGTYYSIDLGGTNFRVLRVEVGAGSVVTRRKVELPIPEELTKGTIEELFNFVAMTLKEFVETEDGNDEQRALGFTFSFPVRQTSVSSGSLIRWNKGFLIEDAVGKDVAQCLNEALARNGLNVRVTALVNDTVGTLALGHYHDEDTVAAVIIGAGTNACYIERTDAIIKCQGLLTNSGGMVVNMEWGSFWSSHLPRTPYDISLDDETQNRNDQGFEKMVSGIYLGEIARLVLHRMALESDFFGDAADNLCTPFTLSTPLLAAIRKDDSPDLSEVRKILQEHLKIPDTPLKTRRLVVKVCDIVTRRAARLAAAGIVGILKKLGRDGSGVASSGRTGGQMRRTVVAIEGGLYEGYPVFREYLDEALVEILGEEVARTVALRVTVDGSGAGAALLAAVHSSNRQQVHREYQAVMGWADRGQGSFSNKKPDMRTAHTITEVRSWATSHKGRKRAPFEKRDGFFQKAPRLQPHVGSSDSARVSRRSAGTVHDGSPIRLIGSVAVGSSFACTVTTRITRIVRRMMHGRRIVRYKQGTPEWDEMLVTSEITGSVIC

SEQ ID NO: 527 - protein, 416 aa, Zea mays
MSWFGHHHHNQPAPPASGPNQVFKIFCRANENYCLAVRDGAVVLAPVNPKDDHQHWYKDMRFSTRVKDEEGMPAFALVNKATGLAIKHSLGQSHPVSYNYFCCCLLRPCLLFVANSPSSSSTPSACRSSSRLSARTRRTRRCCGRRARTWARASAASAWSTTPASTSTPSTATRTTAACTTAPPSCSGSGARARTRAGRSCRGVPRPTPPRPTREARTPCASSARPAARTTASRCATARRAWRPPTRGTSTSTGSRTCATAPGCGTRRATRPSRSSTRSPARRSSTPRGRATPSSSCPTTRTTRTSPCSGPRAATSATASAASAWSTTSTSTSTPSTATRPTAASMTVPRSCSGSGARATTSAGRSSLGERTKETTSWYPNNNSAGCGDPKIKEAGCDASRTSRVVFASDSQPLWG

SEQ ID NO: 528 - protein, 178 aa, Zea mays
LSLEWGIFRGKNKQGSAIQDQDYNSFWQREAASLRQQLHNLQENYRQLTGDDLSGLNVKELQSLENQLETSLRGVRAKKDHLLIDEIHDLNRKASLFHQENTDLYNKINLIRQENDELHKKIYETEGPSGVNRESPTPFNFAVVETRDVPVQLELSTLPQQNNIEPSTAPKLGLQLIP

SEQ ID NO: 529 - protein, 255 aa, Zea mays
MKIFSWVANKIGGKQEPKRSAAHYRGNVSECRNDEFSDWPQSLLAIGTFGNRQLEEGVVETSSGNVQAAQDPAKFTEEEEADSIRRELEVLLLQGNNNNGGQAEAQGSRGDERRQVAWKEHDGECSKEKQPTSGEMVTSKARAREMVAGKKRSTLKPRSVASLLRLLACKGGFATPVLEPRSPFPQSRMEKLLKAILEKKIHPQNPSTAAARRHQLDWKLDEKEIDECLDDALRDLDDDGAKWVKTDSDFIVLEM

SEQ ID NO: 530 - protein, 255 aa, Zea mays; identical to SEQ ID NO: 529

SEQ ID NO: 531 - protein, 322 aa, Zea mays
MQLDLNVAEAPPPVEMEASDSGSSVLNASEAASAGGAPAPAEEGSSSTPAVLEFSILIRSDSDAAGADEDEDATPSPPPRHRHQHQQQLVTRELFPAGAGPPAPTPRHWAELGFFRADLQQQQAPGPRIVPHPHAAPPPAKKSRRGPRSRSSQYRGVTFYRRTGRWESHIWDCGKQVYLVVVRLLADIRRWIRHRSRRCKGVRPGGDQVPRRRRRHQLQPQRLRGRHEADGEPVQGGVRARPAPSEHRLLERQLQVQRRHPAQVRPLGGAHGAVPRQEVHIPWAIRQRSRGCKSLRQGRHQMQWQRGRDELRAEHVSRGAAD

SEQ ID NO: 532 - protein, 451 aa, Zea mays
MGNGGGTGDKTKTKATGGLTGRESSSSSHASKRRRGLRGESMADRFIPNDFPDFVAEAEASDGEGHRPAGHRGLLSLPYTRLSDHFVRAARRLKDKVVEETWVKAGRKVTDYTLYTGSLGTALLLFKSFQVTGDRGDLALAADIVRACDDASRGLPRRFLTFICGRAGVCALGAVIAKHCDDQLRVTQYLSSFDEITITEKVPNELLYGRAGYLWACLFLNKHLSEKTIPLDHINSVAKDIINEGRGFASKGSSPLMYEWHGKKYWGAAHGLAGIMHVLMHTELKPDEQDDVKNTLRYMIKNKFPSGNYPSSEGNESDHLVHWCHGAPGVALTLAKAYEVFHDDYFEQSAAEAAEVVWNRGLLKRVGICHGVSGNAYAFLSLYRLTGNVEYLYRAKAFACFLLEKADQLIAEGAMHGGDRPFSLFEGKAGMSYLLLDMVDPSESRFPAYEL

SEQ ID NO: 533 - protein, 994 aa, Zea mays
MPVRSSVAMTTTAARALAALVLVTAAAAAAAVADDGAALVEIKKSFRNVGNVLYDWAGDDYCSWRGVLCDNVTFAVAALNLSGLNLEGEISPAVGSLKSLVSIDLKSNGLSGQIPDEIGDCSSLRTLDFSFNNLDGDIPFSISKLKHLENLILKNNQLIGAIPSTLSQLPNLKILDLAQNKLTGEIPRLIYWNEVLQYLGLRGNHLEGSLSPDMCQLTGLWYFDVKNNSLTGAIPDTIGNCTSFQVLDLSYNRFTGPIPFNIGFLQVATLSLQGNKFTGPIPSVIGLMQALAVLDLSYNQLSGPIPSILGNLTYTEKLYMQGNRLTGSIPPELGNMSTLHYLELNDNQLTGSIPPELGRLTGLFDLNLANNHLEGPIPDNLSSCVNLNSFNAYGNKLNGTIPRSLRKLESMTYLNLSSNFISGSIPIELSRINNLDTLDLSCNMMTGPIPSSIGNLEHLLRLNLSKNDLVGFIPAEFGNLRSVMEIDLSYNHLGGLIPQELGMLQNLMLLKLENNNITGDVSSLMNCFSLNILNVSYNNLAGAVPTDNNFTRFSHDSFLGNPGLCGYWLGSSCRSTGHRDKPPISKAAIIGVAVGGLVILLMILVAVCRPHHPPAFKDATVSKPVSNGPPKLVILHMNMALHVFDDIMRMTENLSEKYIIGYGASSTVYKCVLKNCKPVAIKKLYAHYPQSLKEFETELETVGSIKHRNLVSLQGYSLSPVGNLLFYDYMESGSLWDVLHEGSSKKNKLDWVTRLRIALGAAQGLAYLHHDCSPRIIHRDVKSKNILLDKDYEAHLTDFGIAKSLCVSKTHTSTYVMGTIGYIDPEYARTSRLNEKSDVYSYGIVLLELLTGKKPVDNECNLHHLILSKTASNEVMETVDPDVGDTCKDLGEVKKLFQLALLCTKRQPSDRPTMHEVVRVLDCLVNPEPPPQPQQQQQKAHAHHQLPPQPSPPAYVDEYVSLRGTGALSCANSSSTSDAELFLKFGEAISQNMV

SEQ ID NO: 534 - protein, 317 aa, Zea mays
MTRRCSHCSHNGHNSRTCPNRGVKIFGVRLTDGSAIRKSASMGNLSLLSAGSTSGGASPADGPDLADGGGGYASDDFVQGSSSASRERKKGVPWTEEEHRRFLLGLQKLGKGDWRGISRNFVVSRTPTQVASHAQKYFIRQSNMSRRKRRSSLFDMVPDESMDLPPLPGSQEPETSVLNQPPLPPPVEEEEEVESMESDTSAVAESSAASALMPESLQPTYPMIVPAYFSPFLQFSVPFWPNQEDGGDLPQETHEIVKPVAVHSKNPINVDELVSMSKLSIGEPGQETVSTSLSLNLLVGQNRQSAFHANPQTRAQA

SEQ ID NO: 535 - protein, 324 aa, Zea mays
MMLSGHGGGRRLFTASQWQELEHQALIFKYMASGAPVPHDLVLPLRLATGVDTAPSLAFPPQPSPSLAYWGCYGAGAPFGRKAAEDTEPGRCRRTDGKKWRCSREAHGDSKYCEKHIHRGKSRSRKPVEVTSSPAAGPAAAYRPSAISTISPPRAADAPPPSLAYPQQHLLHGASSAAGAAARVPAGALQLHLDASLHAAAAAASPSPPPSYHRYAHYTPPASSLFPGGGYGYDYDYGQSKELRRRHFHALGADLSLDKPLPEPDTGSDEKQPLRRFFDEWPRESGDMAADDATQLSISIPAASPSDLAATSASAAAARFHNGE

SEQ ID NO: 536 - protein, 296 aa, Zea mays
MGLRDIELTLPPGFRFYPSDEELVCHYLHGKVANERLAGAGAAMVEVDLHTHEPWELPDVAKLSTNEWYFFSFRDRKYATGLRTNRATKSGYWKATGKDRVIHTPCSRPAAGGGHHRAVVGMRKTLVFYRGRAPNGVKTSWVMHEFRMENPHTPPKEDWVLCRVFYKKKADAMDYADCSDQDAIAVHVPRGSADPGYCYSPPPFPALGGSHHHGGSLNDDFHGGMALLQQQQHNGVFDFHGGQPHPHGGGGGLLAGPPATAVGSRDGGDQCGSGVLMDLGLDDHYAYNSYNSLLQM

SEQ ID NO: 537 - protein, 356 aa, Zea mays
MACLTDLVNLNLSDNTEKIIAEYIWIGGSGMDLRSKARTLSGPVTDPSKLPKWNYDGSSTGQAPGEDSEVILYPQAIFKDPFRRGNNILVMCDCYTPAGEPIPTNKRYNAAKIFSSPEVAAEEPWYGIEQEYTLLQKDTNWPLGWPIGGFPGPQGPYYCGIGAEKSFGRDIVDAHYKACLYAGINISGINGEVMPGQWEFQVGPSVGISSGDQVWVARYILERITEIAGVVVTFDPKPIPGDWNGAGAHTNYSTESMRKEGGYEVIKAAIEKLKLRHREHIAAYGEGNERRLTGRHETADINTFSWGVANRGASVRVGRETEQNGKGYFEDRRPASNMDPYVVTSMIAETTIIWKP

SEQ ID NO: 538 - protein, 1068 aa, Zea mays
MAGNEWINGYLEAILDSHTSSRGAGGGGGGGDPRSPTKAASPRGAHMNFNPSHYFVEEVVKGVDESDLHRTWIKVVATRNARERSTRLENMCWRIWHLARKKKQLELEGIQRISARRKEQEQVRREATEDLAEDLSEGEKGDTIGELAPVETTKKKFQRNFSDLTVWSDDNKEKKLYIVLISVHGLVRGENMELGRDSDTGGQVKYVVELARAMSMMPGVYRVDLFTRQVSSPDVDWSYGEPTEMLCAGSNDGEGMGESGGAYIVRIPCGPRDKYLKKEALWPYLQEFVDGALAHILNMSKALGEQVGNGRPVLPYVIHGHYADAGDVAALLSGALNVPMVLTGHSLGRNKLEQLLKQGRMSKEEIDSTYKIMRRIEGEELALDASELVITSTRQEIDEQWGLYDGFDVKLEKVLRARARRGVSCHGRYMPRMVVIPPGMDFSNVVVHEDIDGDGDVKDDIVGLEGASPKSMPPIWAEVMRFLTNPHKPMILALSRPDPKKNITTLVKAFGECRPLRELANLTLIMGNRDDIDDMSAGNASVLTTVLKLIDKYDLYGSVAFPKHHNQADVPEIYRLAAKMKGVFINPALVEPFGLTLIEAAAHGLPIVATKNGGPVDITNALNNGLLVDPHDQNAIADALLKLVADKNLWQECRRNGLRNIHLYSWPEHCRTYLTRVAGCRLRNPRWLKDTPADAGADEEEFLEDSMDAQDLSLRLSIDGEKSSLNTNDPLWFDPQDQVQKIMNNIKQSSALPPSMSSVAAEGTGSTMNKYPLLRRRRRLFVIAVDCYQDDGRASKKMLQVIQEVFRAVRSDSQMFKISGFTLSTAMPLSETLQLLQLGKIPATDFDALICGSGSEVYYPGTANCMDAEGKLRPDQDYLMHISHRWSHDGARQTIAKLMGAQDGSGDAVEQDVASSNAHCVAFLIKDPQKVKTVDEMRERLRMRGLRCHIMYCRNSTRLQVVPLLASRSQALRYLSVRWGVSVGNMYLITGEHGDTDLEEMLSGLHKTVIVRGVTEKGSEALVRSPGSYKRDDVVPSETPLAAYTTGELKADEIMRALKQVSKTSSGM

SEQ ID NO: 539 - protein, 894 aa, Zea mays
MASSSKASDSSQRSKRSDQGMGKDAAAASVVPIHANLTQLIRQVQSGRLAYIKEKLEVNRKTLQRHSCSLFDVAAAAEVASRGTDGGNALSQRAAERQCGSDLANGIGERDVVSVQEENLATGTLALSSSGATAQRTIVRFVKLPLVEKIPPYTTWIFLDKNQRMADDQSVVGRRRIYYDTVGNEALICSDSDEEIPEPEEEKHFFTKGEDHLIWRATQDHGLNQEVVNVLCQFIGATPSEIEERSEVLFEKNEKHSGSSDKIESRLSLDKTMDAVLDSFDNLFCRRCLVFDCRLHGCSQNLVFPCEKQPYSFDPDENKKPCGHLCYLRFPQWREGFKEMHDDGLAGGATYTMESGTASQRVDVNVMYESEDSNRQKGNIRSMTLVGTSGSKIISSVSAEESTTTPSADISETENVSSDLPPSSLRKHKISKHGPRYREHSPGKRQKVFTSDISFEGNIMNKLSIPEIRDTRLESRESGGDKLRILDESTKKTSRKDMCGESPATTMENVGRQSNKVSSTKNFLESTLSCWSALERDLYLKGIEIFGKNSCLIARNLLSGLKTCIEVANYMYNNGAAMAKRPLLNKSISGDFAENEQDYMEQDMAARTRIYRRRGRNRKLKYTWKSAGHPTVRKRTDDGKQCYTQYSPCACQQMCGKDCPCADKGTCCEKYCGCSKSCKNKFRGCHCAKSQCRSRQCPCFAASRECDPDVCRNCWVSCGDGSLGEPLARGDGYQCGNMKLLLKQQQRILLGRSDVAGWGAFIKNPVNKNDYLGEYTGELISHKEADKRGKIYDRANSSFLFDLNDQYVLDAYRKGDKLKFANHSSNPNCYAKVMLVAGDHRVGIYAKEHIEASEELFYDYRYGPDQAPAWARRPEGSKKDEASVSHRRAHKVAR

SEQ ID NO: 540 - protein, 273 aa, Zea mays
MDDDDDSPPHESAAAAAADLSLTLAPAPALAPPAPPPALPAVASDGGVATARVDGKDVRLFPCLFCNKKFLKSQALGGHQNAHKKERSVGWNPYFYMTPPHPQPNAAPASPTAPPPAYAAGGLLPAPYAAHVYAPVPAAPPPPSFPIASHGSSGGLRYYAPPHEAAAAAAADAGTGAPTTAGVVLAPRARYATATHQQQAQQPGGGGRDDLIDLLNWRRGSHGAPAAAAATASPASTTTTLTTSYAGAPDGGTSTNDDDDADDAGELDLNLSL

SEQ ID NO: 541 - protein, 508 aa, Pichia angusta
MQLSTLWEPPIVNPRNLKATSIPIFNLWNVYGRNFFFGWFGFFVCFLSWFAFPPLLHGMLKKDLRLTAVDISNNNICGLTGTLLGRFILGPLNDKYGPRITLTGVLVAGAIPTAFVPLVTNVAGLHAIRFFISFLGSSFICCSQFCAVFFDNNIIGTANAISAGWGNAGGGVAFFVMPAISNALENRGYSLHHSWSYSFVIGPFLILMITAILIFVFGSDCPRGRWSLRGDILGINMDNMLVKSVSVTRHFSKEGELTSVFVEPVNAIDKVVVEPNQDQEILEVADIINGDEIIEDPSLNDVVKICLSPRTMLVGLCYMCSFGTELAVESIISNLFGQKMTNWSTSKAGAWGSMLGLLNVVARPAGGIISDFLYQRFKTTKAKKFWMIFTGLMQGIFLIWIGLVPELSIAGLIVSVSFLCLWFEMGNGANYACVPVVNRHHSGIVSGVTGAMGNLGGILFSLVFRYTISNGVNNYFKAFWIIGIVCTAVNLVCVLIPIREERPRKAEN

SEQ ID NO: 542 - protein, 349 aa, Diplodia maydis
MSSTTVKLPEPFASIPRSSLTFGPSPIQALPKISQALGGKVNVYAKREDVNSGLAYGGNKVRKLEYLVPQAISSGADTLVSIGGVQSNHTRAVTAVAVASGLKAATVQEHWVDWTDPGYEKVGNLQLSRLMGGDVHLDPSGFGIEHKTTLANLTKDLESKGQKPYYIPAGASDHPFGGLGFARWAFEVEQQEAELGVFFDTIIVCAVTGSTFAGMIAGFKLAQKNGGKPRRVIGIDASAKVQQTFDQVLRIAKFTAVKIGLSEGDITEKDVELVDRYHAGTYGIPDEQTIEAIKFGASTEAFITDPVYEGKSLAGMMDMIKKGEIPGGSNVLYAHLGGQLALNAYSTIP

SEQ ID NO: 543 - protein, 198 aa, Artificial
  Fusion Zea mays Clostridium beijerinickii
MESLILASSCSASPRLPLLSSAARFRGLPVSVPPPSSASISGAARKGPMRPRLFVAAAAAPRGSGNVFEGLRTELKQVYKCEICGNIVEVVHNAGGTLVCCNQPMKLKAENTTDGATEKHVPVIEKVEGGVLVKVGSVEHPMLDNHYIEWIEIHTESNVYKKFLKPGEKPEAFFKVDEPVLFAREYCNLHGLWAEKNS

SEQ ID NO: 544 - protein, 187 aa, Artificial
  Fusion Zea mays Clostridium beijerinickii
MLIISSTPHLGVKAWKMVAWPGSARWAKRLSMGPVPVYSAWNQAPMTASMARRPFLISLVRTELKQVYKCEICGNIVEVVHNAGGTLVCCNQPMKLKAENTTDGATEKHVPVIEKVEGGVLVKVGSVEHPMLDNHYIEWIEIHTESNVYKKFLKPGEKPEAFFKVDEPVLFAREYCNLHGLWAEKNS

SEQ ID NO: 545 - protein, 217 aa, Zea mays
MCVQRLLRLRMASRSCSRCAALAPHAALPLSSLLAPSPSAARPRSAPLSCAARPCRGHAAASALHGAAGRRPPSVAAMSSSTPPPGSVQKSEEEWEAILTPEQFNILRLKGTEYPGTGEYDKFFEEGIYKCAGCGTPLYKSSTKFNSGCGWPAFYEGLPGAIRQTPDPDGRRTEITCTACGGHLGHIFKGEGFKTPTNERHCVNSISLKFNPSPEEA

SEQ ID NO: 546 - protein, 242 aa, Zea mays
MTVPDAESRFHVLAVDDSLVDRKLIEMLLKTSSYQVTTVDSGSKALELLGLRDASSPSPSSPDHQEIDVNLIITDYCMPGMTGYDLLKRVKGSSSLKDIPVVIMSSENVPARISRCLQDGAEEFFLKPVKLADMKKLKSHLLKRKQPKEAQAQAQAQAQQGQAVELEPEQQLDPRTQPAHDAEETAAEPPPAASNGTTDGGNKRKAAAMEEEGMLAVMTVAAPESSTKPRLSTTTSSLAVET

SEQ ID NO: 547 - protein, 135 aa, Zea mays
MSGSKVYTLEEVAKHNTKDDCWLVIGGKVYNVTKFLEDHPGGDDVLLSSTAKDATDDFEDVGHSTTARAMMDEYLVGEIDAATIPSKVKYTPPKQPHYNQDKTPEFVIKILQFLVPLAILGLAVAVRIYTKSESA

SEQ ID NO: 548 - protein, 286 aa, Saccharomyces cerevisiae
METDSGIPGHSFVLKWTKNIFSRTLRASNCVPRHVGFIMDGNRRFARKKEMDVKEGHEAGFVSMSRILELCYEAGVDTATVFAFSIENFKRSSREVESLMTLARERIRQITERGELACKYGVRIKIIGDLSLLDKSLLEDVRVAVETTKNNKRATLNICFPYTGREEILHAMKETIVQHKKGAAIDESTLESHLYTAGVPPLDLLIRTSGVSRLSDFLIWQASSKGVRIELLDCLWPEFGPIRMAWILLKFSFHKSFLNKEYRLEEGDYDEETNGDPIDLKEKKLN

SEQ ID NO: 549 - protein, 608 aa, Zea mays
MATASLALSLRLAPSSRPLSLRRRGAAGVTCRATTATFHQLDAVAVREEESRFRTAAAEGRNLLPLTRCIFSDHLTPVLAYRCLVKEDERDAPSFLFESVEQGSEGTNVGRYSVVGAQPSMEVVAKANHVTVMDHEMKSRREHFVPDPMRIPRTIMEQWNPQIADSLPDAFCGGWVGFFSYDTVRYVETKKLPFSKAPHDDRNLPDIHLGLYSDVIVFDHVEKKTHVIHWVRTDCYRSVDEAYEDGRNRLEALLSRLHCLNVPTLSSGSIKLNVENFGPVMQKSTMSSEEYKNIVVQAKEHILAGDIFQVVLSQRFERRTFADPFEIYRALRIVNPSPYMAYLQARGCILVASSPEILTRVQKRTIINRPLAGTIRRGKTKAEDKTLEQLLLSDEKQCAEHIMLVDLGRNDVGKNLCHLYFFIIFYIRNIEKLLDDKILEWSWLKVSKPGSVKVEKLMNIERYSHVMHISSTVTGELRDDLTCWDALRAALPVGTVSGAPKVRAMELIDQLEVSMRGPYSGGFGGISFRGDMDIALALRTIVFPTASRFDTMYSYTDSKSRQEWVAHLQAGAGIVADSKPDDEHQECINKAAGVARAIDLAESTFLEE

SEQ ID NO: 550 - protein, 961 aa, Sorghum bicolor
MASERHHSIDAQLRALAPGKVSEELIQYDALLVDRFLDILQDLHGPSLREFVQECYEVSADYEGKKDTSKLGELGAKLTGLAPADAILVASSILHMLNLANLAEEVELAHRRRNSKLKHGDFSDEGSATTESDIEETLKRLVSLGKTPAEVFEALKNQSVDLVFTAHPTQSARRSLLQKNARIRNCLTQLSAKDVTVEDKKELDEALHREIQAAFRTDEIRRAQPTPQDEMRYGMSYIHETVWNGVPKFLRRVDTALKNIGINERLPYDVPLIKFCSWMGGDRDGNPRVTPEVTRDVCLLSRMMAANLYINQVEDLMFELSMWRCNDELRARAEEVQSTPASKKVTKYYIEFWKQIPPNEPYRVILGAVRDKLYNTRERARHLLATGFSEISEDAVFTKIEEFLEPLELCYKSLCECGDKAIADGSLLDLLRQVFAFGLSLVKLDIRQESERHTDVIDAITTHLGIGSYRSWPEDKRMEWLVSELKGKRPLLPPDLPMTEEIADVIGAMRVLAELPIDSFGPYIISMCTAPSDVLAVELLQRECGIRQTLPVVPLFERLADLQAAPASVEKLFSTDWYINHINGKQQVMVGYSDSGKDAGRLSAAWQLYVAQEEMAKVAKKYGVKLTLFHGRGGTVGRGGGPTHLAILSQPPDTINGSIRVTVQGEVIEFMFGEENLCFQSLQRFTAATLEHGMHPPVSPKPEWRKLMEEMAVVATEEYRSVVVKEPRFVEYFRSATPETEYGKMNIGSRPAKRKPGGGITTLRAIPWIFSWTQTRFHLPVWLGVGAAFKWAIDKDIKNFQKLKEMYNEWPFFRVTLDLLEMVFAKGDPGIAGLYDELLVAEELKPFGKQLRDKYVETQQLLLQIAGHKDILEGDPYLKQGLRLRNPYITTLNVFQAYTLKRIRDPSFKVTPQPPLSKEFADENKPAGLVKLNPASEYPPGLEDTLILTMKGIAAGMQNTG

SEQ ID NO: 551 - protein, 127 aa, Clostridium beijerinickii
MTELKQVYKCEICGNIVEVVHNAGGTLVCCNQPMKLKAENTTDGATEKHVPVIEKVEGGVLVKVGSVEHPMLDNHYIEWIEIHTESNVYKKFLKPGEKPEAFFKVDEPVLFAREYCNLHGLWAEKNS

SEQ ID NO: 552 - protein, 305 aa, Sorghum bicolor
MDGGTVEDLIRRLLDGKKHKVTGKKAVQLTEPEIRHLCVTAKEVFLSQPNLLELEAPINVCGDIHGQFSDLLRLFEYGGLPPTANYLFLGDYVDRGKQSIETICLLLAYKIRYPDNFFLLRGNHECASINRIYGFYDECKRRFSVRLWKLFTDCFNCLPVAAVIDDKILCMHGGLSPDLDNLNRIREIQRPVDVPDQGLLCDLLWSDPDRDSSGWGDNDRGVSFTFGADKVTEFLNKQDLDLVCRAHQVVEDGYEFFADRQLVTIFSAPNYCGEFNNAGALMNVDASLLCSFQILKPYRGKAQTE

SEQ ID NO: 553 - protein, 125 aa, Zea mays
MQGGRSMSAVEAAKEAATNVGASAWASKEKTKAVVQEKAAKARAHDPAEKAVAEARMQERVHEVEAIKQDAMRKNATAKERATAAEHHPTPLDVGAASATAPAAGAGVPVATTETGVAAKPPGGT

SEQ ID NO: 554 - protein, 123 aa, Zea mays
MANGCSTTTTSSLLLFFLLSYLLIGHALCSQGHNGRTSGADYVVQYLHQELPGKHIVLQETVKGLNKGILPKYARRMLIGSIAPICTYNECRGCRFKCTAEQVPVDANDPMNSAYHYKCVCHR

SEQ ID NO: 555 - protein, 602 aa, Ustilago maydis
MKSILVGAALATFATFVSAAPSTIDPFDFREADLVYPRMNYDSAQHDARALGKGQCLNSNGSSLAGYQPALYTEPVRPQIHFSPTVNFMNDPNGLVYSNGKWHLFYQYNPTENVAGNQHWGHAVSTDLYHWENLPIAIAPEKEGEGIFSGNAVIDFENTSGFFNESTPKDQRIVAFYTLNTPTSQTQHLAYSSDGVHFTKYPEAVISRNQTQFRDPKAFWDEKSSRWIVALALSQEFGIVFYSSPNLKDWTEVSRFQSSGILGYQYECPDLFQVPIEGGPDDGKMMYVLAISINPGALVGGSFVQYWVGDWDGSKFTPRDNAVRTMDFSKDFYAFSSWNNSPGKKAYAIAWANNWQYTNQVPTSPFRSIQSLPRELTLKYYRPTPQFGDLILNNKPANLSALRSKTLYKSDNGNSATNKTVHLKGKGAFDITATFKLPASSKITYNTIASFEIFAGDGKQSVKTGIQMGEPAVAYIDRRGAGPSFAAENPFFTDKTSGIVRYAANYTSASDGGSDQYVLGPLPTSAYLDTAGKDQYIKLQAVVDRSVIEVFVNDGELAGTSVFYFDNDEIPAKVTVSIGDNQIKLVDLEVTALDSIWSKCNK

SEQ ID NO: 556 - protein, 681 aa, Ustilago maydis
MSPVPTQDSSSMLPSTMQHAHTSLVEPAQKLGSDSFSYAHLCSTRSHSHPIQDHPFAAASEFSSLASPTSSASASDHPTCTPASSGIPSPFEELAESDMLKSSGQADCDSKNTLFDQWRPTSHFLGPHGWMNDPCGPSYDPRTGLYHLWYQWNPSGSTWGNISWGHAYSHDMVHWTCRHQPVLSPGANHDSEGVFTGCVLQRASIGAPEQAASSAEMSALYTAVSKLPIHHTLPYHYGSEKVVLSTSADGGETWTPQGIVVHGPPEHLDVISWRDPYIGEWPLLDALLARETRGLYALIAGGIKDTTPTTFAYSIDATDLSQWTFVGTLADVGVNYKAAPYGIDLGKNWEVANFFTITDKSNAARSTAAEYLLINVEGCTEPGPARQPVYMRLDLDATQQTDEGEIRLASAHVGLLDHGCLYAASSFHDQKHNRRIMWGWITEDDLPEEYYNTQGWAGLISLPRELFHHASSCELGIRPAIEVDELRRGAQRISVSSDCMVSHAILELAEAAATDATADADAVAVAKAEAEAEAVELGVVHVPQVNRRSYELQIELSADQPGLVVAHSKDLSTRTLVYISSCGQLVVDRSLSAGQTSVIAKQINVNTCTLRAPLSTQSPTHKLRMFLDNSVLEIFLDDLIALSTRIYPDPDDVHLSILTNPNAKPQGDVHIWQGLDRAILG

SEQ ID NO: 557 - protein, 360 aa, Zea mays
MEFKNCGSSSQPRPAVVVGEEAALARQGSVYSLTFDEFQSALGGAATGGGGGGSIPKDFGSMNMDELLRSIWTAEETQAMASASGAGAGAGMPPTSLQRQGSSLTLPRTLSTKTVDEVWRNLVRDEPLQGADGGGHQQHHRQSTLGEMTLEEFLVRAGVVRENPAPAPPAPPPMIPPRPVPVAPKSSAFFGNLPGADADTAAAAAALGFAPVGMGDLAQIPPRAAGMGGGAMAVQAAVNQLDSGGKGYSDLSSPTEPLPFSFEGMIRGRRHGGGVEKVVERRQRRMIKNRESAARSRARKQAYTMELEAEVQKLKEQNQELERKQAEIMEMQKNELPEMLKDPFGRKKRLCLRRTLTGPW

SEQ ID NO: 558 - protein, 301 aa, Agrobacterium tumefaciens
MTNCFQGDSHAPHFVEKQVAFWEEPKATCSSRRNIEEENITASGTDFSCAKKSICIQHIARPMDLRLIFGPTCTGKTSTAIALAQQTGLPVLSLDRVQCCPQLSTGSGRPTVEELKGTTRLYLDDRPLVKGIITAKQAHERLIAEVHNHEAKGGLILEGGSISLLRCMAQSRYWNADFRWHIIRNELADEESFMSVAKTRVKQMLRPSAGLSIIQELVQLWREPRLRPILEGIDGYRYALLFATQNQITPDMLLQLDADMENKLIHGIAQEFLIHARRQEQKFPLVGATAVEAFEGPPFRM

SEQ ID NO: 559 - protein, 227 aa, Oryza sativa
MGERVKLIGAFASAYGHRAEVALRLKGVRYELILEDLRNKSDLLLNHNPVHKLVPVLLHGDRSLSESLVILEYIDESFHGPPILPTDPYDRAVARFWAQFIDQKFGRFNFWIPFVQMEGNMQDCFVREAKENLALLEGQLKGRRFFGGDAIGFLDIAACLIAHWLGAFEEVCGVTLATDEEFPALCEWRRRYVNDEAVKPCLPNRDELVAYYRERKEMIKAAGRQHK

SEQ ID NO: 560 - protein, 482 aa, Oryza sativa
MEDSARPTPADSGELPNGAGMAEDAVVAPDAGEAPEEGEESGIANDSETNAALGAEGEPSRALTMRELLGELKDSGEPSSGRSTLSEGNGIGSAGAERASQDSLQFSSHHDVAMDLINSVTGVDEEGRSRQRILSFAAKRYVSAIERNPEDPDAYYNWALVLQESADNVDPDSSSSKDSLLEEACKKYAEATRLCPTLYDAYYNWAIAIADRAKMRGRTKEAEELWKQAIMNYDKAVQLNWNSPQALNNWGLGLQELSAIVPARDKQTIIKTAISKFRSAIQLQFDFHRAIYNLGTVLYGLAEDTMRSAGPDVSPNDLYSQSAIYVAAAHALKPNYSVYRSALRLVRSMLPLPYLKAGYLTAPPADNTIAPHKHWERSEFVLNHEGLQQVDASESPSSKPLGHMGRSKKYIKVAVEDIVSVSACSDLTLPPGAGLCIETIHGPLFLVADTWESLDGWLDAIRLVYTIFARGKSDVLAGIITG

SEQ ID NO: 561 - protein, 194 aa, Oryza sativa
MADPRLFSSGSGTRDDRTDASGRRLYNPYQDLNIPYKQLYDLPTSPEFLFQEESLAQRRSWGENLTYYTGIGYLSGAVAGAAVGLRDAARNAEPGDTAKIRANRVLNSCGSNGRRMGNTLGVIGLLYAGIESGMVAVRDRDDWINSVTAGLGTGALFRAANGPRSAAVAGAIGGVLAGAAMAGKQAAKRYVPAL

SEQ ID NO: 562 - protein, 178 aa, Oryza sativa
MYLLSPRNGDEEDEQEEIQELISDDEPPNLKLASCATAASSSSSSGSDMEKGRGKACGGGSTAPPPPPPSSSGKSGGGGGSNIREAAASGGGGGVWGKYFSVESLLLLVCVTASLVILPLVLPPLPPPPSMLMLVPVAMLVLLLALAFMPTTTSSSSSAGGGGGGGRNGATTGHAPYL

SEQ ID NO: 563 - protein, 164 aa, Oryza sativa
MKFPTRPPTVPMAPATATAVASPSTSSRLLHRSLLSPTPTAARCLRPPLCRGRLRTVRQVVANGDVSSPSSDVAAEESAAAPKIGKRVRVTAPVRVHHVSKAPDLDICGMEGVVKQYVGIWKGKRITANLPFKVEFELRVDGQDKPVRFFAHLREDEFELVEDE

SEQ ID NO: 564 - protein, 249 aa, Oryza sativa
MGRGPVQLRRIENKINRQVTFSKRRNGLLKKAHEISVLCDADVALIVFSTKGKLYEFSSHSSMEGILERYQRYSFDERAVLEPNTEDQENWGDEYGILKSKLDALQKSQRQLLGEQLDTLTIKELQQLEHQLEYSLKHIRSKKNQLLFESISELQKKEKSLKNQNNVLQKLMETEKEKNNAIINTNREEQNGATPSTSSPTPVTAPDPIPTTNNSQSQPRGSGESEAQPSPAQAGNSKLPPWMLRTSHT

SEQ ID NO: 565 - protein, 67 aa, Oryza sativa
MSDQSSYPNPAQGYYQGPPASAAAGQDNTAAGGGKSNAAKKDQPSFMDNLLACLPCARPAEAKNDAS

SEQ ID NO: 566 - protein, 101 aa, Oryza sativa
MFFYYKLFYYKILMCFCKKKSVFFSIVVSVYFPHDATALTQPIYAFAYRYTRAQLTICPLGSWLPQLDNGHASPEPNGLMGFSFFYYSLFSPTHFDISWYK

SEQ ID NO: 567 - protein, 333 aa, Oryza sativa
MSMMSFLSMVEAELPPGFRFHPRDDELICDYLAPKVAGKVGFSGRRPPMVDVDLNKVEPWDLPEVASVGGKEWYFFSLRDRKYATGQRTNRATVSGYWKATGKDRVVARRGALVGMRKTLVFYQGRAPKGRKTEWVMHEYRMEGVHDQQASSFSSKEDWVLCRVICKRKSGGGATSKSRSLTTTTTTIVHDTSTPTSSPPLPPLMDTTLAQLQASMNTSSSSAIAAVAALEQVPCFSSFSNSIASNNNNSNSATVNAQQCYLPIVTGSNNNGMSYLDHGLPEFGSFLDTQSCDKKMLKAVLSQLNSIGGEVLPGLPPPSEMAAAVSSSWMNHF
